United States Patent Application Publication US 2026/0185061 A1 - sequence listing, part 3

SEQ ID NO: 6609 - protein, 522 aa, unidentified
  source 1..522: note = uncultivated organism
MKTTTNLRQLNCAIYTRKSTEEGLEQEFNTLDAQRESAECYIKSQEAEGWVCLPDHYDDGGYTGGNMERPALKRLLADIEAGKVDCVVVYKVDRLSRSLMDFAKMLEVFERKRVAFVSVTQQFNTTNSMGRLMLNVLLSFAQFEREIISERTRDKMAAARRKGKWVGGLAPLGYDIDPVARRLKVNEDEASRVRSIFELYLEVGSIVSTLKEIDRREWRNKRSITKKGKERGGRHFDKSSLFKLLTNMAYIAKIRYKEEVHNGEHEPIVPVELWDRVQKLLKHNGKTGGVAVRNKFGALLKGLVRCVCCDCAMTPNHTTKAGNKRYRYYVCSSAQKRGWHTCPSKSIPAKQIEDFVVSQVKKIGYAPEILKDVVEATKLKAQKHLLQLQEERVTIERDTARWSNEIFKMTSQITSSEMNSPAVARLADLQERIQHNERRMLAIDKELAEVDTNTSDAPAIESAVLTFDPIWEAMTLRDQIRLINMIVKRVDYDGESGRVTITFHLHGGKSQAEYAAKDLSQV

SEQ ID NO: 6610 - protein, 564 aa, unidentified
  source 1..564: note = uncultivated organism
MSTGQRLRCAVYTRKSSEEGLEQEFNSLDAQREACSAFITSQVGLGWKLVADRYDDGGISGGTMERPALKRLLADIAAKKVDVVVVYKIDRLTRALTDFAKIVEVFDGNGVSFVSVTQQFNTTTSMGRLTLNVLLSFAQFEREVTAERIRDKIAASKAKGMWMGGTVPLGYRVESRKLLIKEPEASFVRGLFTRYLELKSVPSLAAEVTRAAIAAEPRQDETASSDYTRRVGSGMLYKLLANPIYIGRLKHLQHVHHGEHQPIVDADLFDRVQRLLTAQAATPRVSSVHADVHLLTGILFDDTGDRMSPTHAKAHGMRYRYYISSRLKGAKRIENAAWRIPASELESIATNFIIRLLADRSQLVDWIGSYAPVSDIKQCLDRATHLSNRFAIETPADQRTILQSLLHSITLGSEAITVVLKASELVRMLTGQPADATSDIDEAENPLRTIKLPVTIKRRGNEMRLLIQGVGQHRTPDPQLVSLLARAHLYLQHLTRAPGISVSDVAKDFGVHRVDVGRILPLAFLAPKVVDQILTGNQPDEMSARKLARADLRLLWVEQASALR

SEQ ID NO: 6611 - protein, 538 aa, unidentified
  source 1..538: note = uncultivated organism
MDSDSSDWLKMEKTDEKKQIRCAIYTRKSTSEGLEKDFTSLDAQRESAESYIQSQQHQGWKLLPEKYDDGGFTGATMDRPALQRLMDAIRLRKIDCLVVYKVDRLSRSLMDFVKLLQFFEENQITFVSVTQHFNTNTSMGRLTLNILLSFAQFEREMISERTKDKMGAARIKGKWVGGRPPLGYDTDRNIRKLIVNSKEADLVRSVFRLYLEKKSLLDVAHTLNERGHRTKTLRSERKVTGGIPFKNTNIQIMLKNVTYLGKVSYGGKIYPGEHAAIIEEDIFNKAQEIMKQNTRERGVTKNRKFPGLLSGIFRCSYCNASMSHGYTQRGSSKYRYYICLNAIKRGRKDCPVKSMSALPIERRVVELLRTITQKDIPEESEWQKLPLEKQTEQIQALIQLIEYDGRENKLRMQLKSGRTKHEFDLPLDQLKRQSGTTGDKFFSEPPIRRQLLLAHQIQGMLDDGRVKDLNQLAEWLGISKARLEQIMNLLFLAPAIQEEIICGNPHRLAKISERGLRPISFEFNWQKQVSAWENFLQS

SEQ ID NO: 6612 - protein, 570 aa, unidentified
  source 1..570: note = uncultivated organism
MCVAKEANAMKEKETAAIYCRLSQDDGSVGESGSIQTQKTLLTQYCKEHQIEIGGYYCDDGWSGTNFDRPEFKRMLKDIEGEKINLVIVKDLSRFGREYAQMGLYIEHYFEEKGVRFISVAENIDSANGIDNLVLPFTNVINSFYARQASTKTKAAHRARVKSGMFIGSRAPFGYQKDPNDRHHLIVDPPAADVVRDIFQMFADGIGYVRMTKILRERGILNPQAYFNQNNPDYYKNSDYWRKPFDWHATSVRAILNNPVYLGKVVFGRSKTKGFFDKRRVETAEEEWVVAENTHEPLITQELWDTVHQMMKARRRENGKGEVQPFAGLVKCADCGSSLNVSYDKKHERYTGFSCWVYKNYGKKRCTSHAIGWKTLNQLVLEDIRRNAIVARTNTGEYMDMLIAAKTEKKKAETDRCRRELKKVDKRIAELSKILTKLYEDAALEKISEERYQAMAPGYEREQAVLKEKREELTTEITHSEEIYENIEAFLPVIWKYTNITKLTPHILNELIEKIVVHEKVVAEDGSKSQQVDIHYKFIGCVNWKREPASYSVLEAAVLQEHQMCSEQTA

SEQ ID NO: 6613 - protein, 529 aa, unidentified
  source 1..529: note = uncultivated organism
MRGRTARLRTPGKTLRCAIYTRKSTEHGLELEFNSLDAQREACEAYIKSQASEGWICLPKRYDDPAFSGGNLDRPALQRLLKDIEASLVDVVVVYKIDRLTRSLSDFAKLVEVFDAKSISFVAVTQQFNTTTSMGRLTLNILLSFAQFERELSSERVRDKVAASRKKGKWTGGGVSLGYASRDKKLVINEAEAKTVRMIFERYLTLKSVPKLIEELDRKGVVTKKRPLKGKTAGGVPFNYGSLIYLLKNRTYLGEVGHAGKWFEGEHEPILDRDTFDRVQEVIKANATRRTKRRTEAGALLAGILYDDRGNRMSPSYSIKNGVRYPFYVSAALLRGRKQEAGSIARVSATEIEKLALKALRKHAEEVGNGSALTPQEMIERLVRRINLRPGKIAIDLKETASGSLPPVEVPWSPPKKNGFAQVSEPAETPNPHAQPQPKPELVQALVRAHLWLKQLQDGRFGSIDELARSTKVHPKNVRLGLRLAFLEPSVTKDILRGALPAGALADLNEVGASGLVWKTRTVHAAETP

SEQ ID NO: 6614 - protein, 578 aa, unidentified
  source 1..578: note = uncultivated organism
MSADHKPVVRCAIYTRKSSEEGLEQSFNSLDAQREACQAFILSQRQEGWRALPARYDDGGYSGGNLERPALKQLLADVEASKVDTIVVYKVDRLTRSLADFAKIVETLDARGVSFVSVTQQFNTTSSMGRLTLNVLLSFAQFEREVTGERIRDKIAASKRKGMWMGGARPLGYDAKERKLIVNLKEAQLVCDLYRLYLELGCVSKLKSHLDQQGIKSRARISAAGNHSGGASYSRGALYQILKNRLYLGEIVHRDQVYAGEHQGIVPRELWDRAQAQLRSDNQGRRIGIRATAPSLLAGLLEDAQGSRFTPSHAVKRGRRYRYYVCRSAKSDLDRATGPTVRLPAGEIEALVLARLRSALQSDHEIIDRLGLASDAPAFTQQLITSARKWSLEWGSVVPADIHKLASSAIKRVIVREQKVELYVSRSELRAVLGRDRGPSSAQVPGDDLFVLETAAKLKRCGGEIRLVVPPKSDGKIVEKPAPALLRAIARAHDWRERLADGSLHNGRSIAGSSGLNQRYVSRVLQCALLAPDIVEAILDGRQPPDLTVRKLWGDIPTDWAEQRKRLGFLSTRCLAKL

SEQ ID NO: 6615 - protein, 560 aa, unidentified
  source 1..560: note = uncultivated organism
MAKLVRCAIYTRKSTEEGLEQEFNSLDAQREACAAYILSQKHEGWSQVPGIYDDGGFSGGNMERPGLKALLAEVAAGNVDVICVYKIDRLTRSLADFSRIVDVLDKAKASFVSVTQSFNTTTSMGRLTLNVLLSFAQFEREVTGERIRDKFAASKRKGIWMGGVVPLGYDVLSRKLIVNEAEAETVRHIFRRYLELRSIEQLADELAAQGIKSKVRSASTMAAYGGRTIGRGALAYLLKNRVYIGEIGHKGSYYPGEHAPLMDKQLFEAVQKVLADGRAEGRVKTNSKERSLLAGIISDAEGRPMQPSHTRRGTKRYRYYVTTPHAPGENSITDGWRIPAGEIEGLVQARLSAWLADEAQLYSLLVNMVEEDRLRWLVDDCSELGKQAANWAPRQVRGLLLELSAKVAIAADRTVLTICVSKLVERVGAIPLSSDHKPHAIIVPASFIRRGHELRLTYRANDNGAPTRADPKLIELLGKAELAYEELSVGGPMEVNRRNHLVRLARLRFLAPDILTGILDGRQPVSITARSLLRMSNLPVSWSEQRRELGCLPEARELVA

SEQ ID NO: 6616 - protein, 529 aa, unidentified
  source 1..529: note = uncultivated organism
MAKVTIIPSKINPITQLPHNSLNKRKVAAYARVSTLQDEQVSSYDAQVDYYKKYIAERKDWEYVDIYTDKGISGTNRKNRTGFNQMIDDAINGKIDLIVTKSVTRFARNTLDTISVTRELKSHGVEVFFEEQNVYTFESSGELMLTIMASIAQEESRNISENVKWGKRKKYNDGITSLAYKHFLGYDKHPTDPKKGFVINEQQAQVVRLIYKMFMRGKTLSYIAKFLEEKEHKTPMGKEKWRLSTIESILTNEKYKGDALICKTYVKDFLDQKLIKNNGEVDQVYVEGHHDPIIDPTQWELVQAELARRKNLSNSYKCKSAFSSKLVCAHCGSFYGQKVWHSTSKYRRQVYQCNDKFNKSHSKCQTPTITEDDVITRFIEAYTTFMGDKSKVISDCKEIIKILDDSSELEKEIEHHTARVNEIVVLVQNLIDKNASFPMSQEEFQSKYDEYDNEYKELNTKVNEIEESIRHKKAQSKNIQAFISDLANRPSVLSEWDEEVWNYLVEKATVNEGSSITFLFKSGEEVNVK

SEQ ID NO: 6617 - protein, 514 aa, unidentified
  source 1..514: note = uncultivated organism
MPEVKIIQPIVEQAKKLRVAAYARVSSDSVDQLNSFATQVAYYTDFIQSKDEWEFAGLYADEAVSGTTADKRNDFQRLLADCRVGKIDRILVKSISRFARNTIDCIQTVRELKQLGIAVEFEKEYIDTGNMGSEMLLSILGSAAQEESLSISKNLKWSYRRRMKSGDFITCSAPLGYYLKNGTLIPDSQEVPIVEYIFSSYLTGKSTTEIARTLNETGLKTDKKASGHWSPSRIKYILSNEKYVGDSLVQKYYTPDELPLREKRNKGEISQYYIQNSHPAIISREIFNSVQELLQKRRAPYTMKSRAPKVALSNMMRCGACGSNFHKHHYSGKNRWSCALHKENKDLCRMPVLYEEEAYSAFLSIHNKLLDNIDILKTMLFQMIELQAKAIRIRPDIKSLDEKISDFIKQNHSLTKLQTKGYIDSAIFIKKVNCNNKNIEKLRRELQQLQEPDEISSTIDGTRLLLDLLKDTNPMLKFEDSVFQSMVRQITVHQEKFCFQLINGLILEERRVHS

SEQ ID NO: 6618 - protein, 568 aa, unidentified
  source 1..568: note = uncultivated organism
MREPQKPSELRCAIYTRKSSEEGLEQDFNSLHAQREACEAYIKSQKHEGWKGLSAHYDDGGYSGGSMERPALQRLLADIHAKRVDTVVVYKVDRLTRSLADFAKIVEVFDASEVSFVSVTQAFNTTTSMGRLTLNVLLSFAQFEREVTGERIRDKIAASKKKGLWMGGFIPFGYRANDRTLVIDEGEAATVRLIFRRYLDVGTVSALESDIAERNIRTRAFTSANSNRAWGNRPFSRGHLYKMLSNPIYTGKIAHKDKLFDGRHEAIIDRKIFAAVQAQLAANSRRNRTQARAKDPNQLAGLLVDADGTKLTSSHTVKGGKRYRYYTGVRLEGGQSKSWRVPAADIETAVIGELKRFLGDRQRIASALKRSRLQARELKEALQNADRLRTQLDAFASCRDVAFKLIKRVVVSDSELILELRLGSLLSETSATRTTIYRVTIPIELIRKIDGAIVLASSSDRTTAADPALVKALARGAAWFEELATGRADTVTAIAKRERVTDRYVSQLVELAFIDPRIVQRVLAGTARSAISATRLVFRTRLPLTWAAQKDLVFADRHHPSAQSVRRV

SEQ ID NO: 6619 - protein, 573 aa, unidentified
  source 1..573: note = uncultivated organism
MKENIQKVLPLRIGIYARKSKFTGKGKSVENQIKICTEYAKSHLINDMEEINIEIYKDEGISGKDIISRPGILKLISDIEQGKIQMVICYRLDRISRNVKDFSDLVTKLSGSGAGFISVNESFDTRTPVGRAMMYMASVFAQLERETITERITDNMYALAKTGCWLGGRTPLGYTSARIEETDSAGRKISRYCLEAKADETDIVKLLYYKYLELGSLTKLETYLINNNYHTRDGKFYGRYTLKSILSNPVYCVAGKVIYKYLAANGYSIYTEQRLFNGTKGLMAYNKNNCKAKGHRINNPQDWIIATGMHKGLIPQETWINVQEKLKKNSGKSYRYPKTINALFSGIVRCSRCGSFMRPKGGRITSSGEKRYYYQCELKEKSKGSLCQMPNIPGNILDKMAVAEILDLRQKLLKDCSYLQKEIEKIKDNIWDKQKKDIILKQIEDYSRQETALLDALGKSSSEAVTSLVLKKLDEITATKGRLQQQYNKELAELQENTEKYPCRLLAENILNLNQEAWELINPARQKDILGIVIKEMIWDGRNIIIHLQAENNLQKNSVQDADKDGAEVMNCL

SEQ ID NO: 6620 - protein, 584 aa, unidentified
  source 1..584: note = uncultivated organism
MNVHVDPKTEHSTSNKPQSKKLKCAIYTRKSSEEGLEQEFNSLDAQREACEAYIASQASLGWKLVSKAYDDGGISGGTMKRPALQELLQDIRKGLVDVIVVYKIDRLTRSLMDFAKMVDVFDGKGVSFVSVTQQFNTTTSMGRLTLNVLLSFAQFEREVTGERIRDKIAASKKKGMWMGGKVPLGYKVEERKLLINTDEADTVRYLYKRYLELDSVTKLVEDAKANGLTGRVVHQKNGTIKTTRPFGRGNLYHLLSNVIYIGKVSHKEEVFEGEHRAIIEQELWDDVQGKLKSNAVNRKLGTNSKSRNLLTGLLYDANGNRLTPSHANKKGVRYGYYVSKQLIEGESKTEDAALSEGNDSGKVKTTWRLPAQEIDQTVLDIVCENLTEPIKLNALLPSNNLTIEQHQSLTAQAEKLITKLNTSTLVSQRKLLIKLLDRVELHLDKIVLDINLEVLTNQANTSHRIEVPCQLKKRGVEARLVIGQTKHQKPKSDQQLIMLIAKAHEFLNKLTDGSASSISELAKTQTQSASQISRMLQFTFLAPDIIESVLAGIQPANLTAEKLRRLSYLPVNWNEQKELLGFNN

SEQ ID NO: 6621 - protein, 731 aa, unidentified
  source 1..731: note = uncultivated organism
MLTITKKKLEIEPKLLSKIKWACQFGTKDKPIIVHGSLRVIDKTNLAYIEPHKVFVNNSIYLFFNGIDYFYKNDLTTKIPLKNLEEYIRNHWCTSLLDSFKKLIIKMKISMIEKLLVSFILERRKKLSELDDDTREKIAGVYIRVSTEDQAREGFSLGEQEEKLKGLCDYKGIKIYKVYKDAGISAKDMEHRPAFKQMLQDMRDGKINYIVAYKLDRVTRSVRDLEELIRELEKYNCYLLCDRDDVNTSNANGRFFVRMLTVLSQLEIEIVSERTKFGMSGAFKAGHLSGKPPLGYKRDNNKRLVPDETTKDIVIRMFNMYLEGKSYQQIANILNQEKVLAPKHWRDNTIESMLTNRIYVGDFELYKRNPNKETIVYMNVVEPLISRAMWDDVQNQSILNQRSYIRNRVYIFFQKLKCPICGKLMTCKGTGGNEKRKSKYQYYACLEDGIYYREDDVEKSLLQFIKDLVSYDYTIQKYFFPVLADKKDVDIENYDKEIKSLKSQKERLKKAYSEGVIELDDLKEDYKSIESKIDTLESKKVEKMNVEDFSYTPAQLLANRDIDRINFNEEDFYFESIWGSMTKEEKQEFFSKFIESVTLDRDENGQYVIKQVNFRTSFTEQLSKLAEFGLLEFRNEDKKDEDNEPVETSVMITKEQVQAYLDELKKQVDVEYYKAFDLDKDKDIAEKSIKYKHKDEKLLRQVAMTNVHKNGLEKKYKEFGIITYRNKKYTK

SEQ ID NO: 6622 - protein, 550 aa, unidentified
  source 1..550: note = uncultivated organism
MKAVLYLRYSSHSQTEQSIEGQERECTEFCNRNELTIVGKYIDRATSASKNIEKRTEFLRMIRDSSSGKFDAVVVWSIDRFARSTKDASYYKALLKANNVKLISTKETIPDDPTGIIIGTLFDAMAEYYSAELSAKVTRGMHETALKGQSLGSYPPAGYKINKDKKYVIDEEKAEFIKKAWKMFAEGESQNDVKDYLKSVGVKNAAEKDWTYNSLRRMFENEKYIGIYESMGVRIEDAIPPLIDIKTWTTVQNRLKGGKSTMYKTPNLYLFSSNLYCANCGERMVAYSGTGGHNKKQYLYYRCKNHNRKKTDPSYCSSTPIKKELLEQAVIEDTFKLFMALDLDALTEYLYENLERFVSIESMPTLEKKIKKVQTQIDNLTEAIANVGFNESIGKRLSAAEAELKELYGTRDELLVVLPAKEELREFLYKTFNGGQISYKEKEHIAKIIVDRIEYDSSKNEKTIKIVYNLWGQTAIKKNLRIQERITAMAENDSVKSGQEKISKPTKYGTSEAGSRFYNWCTSREQLRTELIIYRFDDVSAMFTLSDTKR

SEQ ID NO: 6623 - protein, 510 aa, unidentified
  source 1..510: note = uncultivated organism
MDRQEKKKLLAKFGKVPLEQRAAIYARYSTQNQTPESIERQNQLCHDYAQENGLTVVKEYHDDAKSGTQTATRDSYNRMLEDSAEGVFSKVIVFKLDRFSRNLRDFLNDQHMLNENGVEILSTLEILPDGISGKLVKYNLIIAAELYSDSVADHTTSAMYRNARLGNYNGGKIPLGYRAVDDGSSKRYVVDENESEIAAFIFEQYAQGKSYSDLVELLDQRGWRTKNGDRFSIGSFNSIFNNRIYIGEYGYGKGTSKAVVTKIPELQIVPDDIFEKVQKRLSQNKVLAGRHRAKRGYILSGFVQCAKCGSNMHHDPNRPKNKKKAAYTSYRCPNTKKKDEHGEPLCDNLRIRRKYLERYVMDKIFRDLFGNASLQDVTERLNAVILEQARDSERELQEMQKLLKKNQQALKRLKTQKADGKHDLNWDEEVEKVNANIEDIRDTISKLENKRDSMTCKTDDVMRLIKMIRSADIKKLQAPEIEEFMDAYLDSVKVDDEYVRVKLNLNRIVE

SEQ ID NO: 6624 - protein, 623 aa, unidentified
  source 1..623: note = uncultivated organism
MQLKELDFEAKTPKGTRVAVYVRCSTDEQAKDDHYGIKIQEDKGRAFCTSQEGYSLQENHIYKDEGFSGSLPIENRPALKQLFEAAGRHEFDIVIVYKIDRIARNLRVLLNALEDLKKLGIGFRSITEPFDTSSAFGESTVQMVGLFAQLERKLIQERTSGGREAAAKDGKWVMGLPPFGYQRNKATGKLEIVDEEAKAVRQFYKWVADEKLSLREVQRRANDLQISAPKFRVYKKKTTLNFWHKRTLNRILTNEAYTGLTYYRKYKRPFKGLDSLNNPELQLPQKGWIPMEVPQIITPELFERTKRQLSNNREFAKRNLKHDYLFSKLIYCGECGFKMFGGYKPPRKQEHNGMKYYHGVYNNQKTPGESNRCPRCMQYSENRLEPIWDTLKEILKQPKIIFNPLQEYSTKQIDKTDINEQLQQIDKQLAALRIRNDRLEKIYLEDQNFSSDKYHEYKKLIEIEVENLKNKQLKLNQFLLTREEKIDRERSISKLYEKIKERLDNATYEEKAKIIRLFINRINLFAKTNFGEVVFNFPTENLIPTVDSYIKDLRDNCYINSPAKADGLRDNCFGRIPGIPPRYTRSLAPANRRGDHKCFAGQACDLAASAVYPDTRLKPLSLR

SEQ ID NO: 6625 - protein, 523 aa, unidentified
  source 1..523: note = uncultivated organism
MSKPRLNCAIYTRKSSDEGLEQSFNSLDAQREACEAYIKSQKHEGWNLLSTAYDDGGYSGGTMERPAVQKLMGDVQAGRVQIIVVYKVDRLTRSLADFAKMVELFDQQNVSFVSVTQQFNTTTSMGRLTLNVLLSFAQFEREVTGERIRDKIAASKAKGMWMGGVVPLGYEPKERTLIPIPDEADKVRYIFDRYLALGSVWELYDELKANSILSKKRILKDGRIKGSMTITRGMLYQMLQNPLYIGQIRHKKKIYPGQHEAIVPMSLWEAVQQQLAGNRIEHKTKTRNGPSILTSLLFDDSGERLTPTSTIRDGRRYRYYVLASMTQAKTTRRLRIPAGDIEEMVLANLKKHIEEQSDDFATHLLQSLNSTEPILQRAAILQVVEKIIVSADRIDMRLKDGTKLTTQYRFTSPGRHKGIVDSANEFQAPESQRKSLLRALVQGYVWRKRLFDNGESVTEIARSEGKSDGYISRHIHFSLMAPDIMSQILRGDIPAHVMRERLIYNWPMEWAEQVKRLNNINML

SEQ ID NO: 6626 - protein, 522 aa, unidentified
  source 1..522: note = uncultivated organism
MAKKVTAIPPKLNKMTSQPILSNKKRRVCGYARVSTDNEEQASSYEAQMDYYSTYINARDDWEFVGMYSDEGISATSTKRRDGFNSMVEDSLDGKIDLIITKSVSRFARNTVDSLSTIRKLKDKGTEVYFEKENIWTFDAKGELLITIMSSLAQEESRSISENTTWGRRKSFADGKVSVAYTRFLGYGKDFKIIEDQAETVRLIFKLFLDGLSCYAICKRLEKLDRETAAGGKQWHQSSIISILQNEKYKGDGLLQKSYTVDFLTHKRVVNNGQLKQYYVEDHHEGIIDNKTFDLAQSEMRRRRKNKGGYSGKSIFSSKLICGDCGSFFGPKVWHSTDKYRKTVWRCNHKYNDGHKCDTSYVTENEIKTMFLQALNKALKDKEGFLEDLQLLRQMSGDINSLQAEADAMNAEMESIYQASMEMISDNAKGVQDQETYNKRYNKLLSRNEELQKQHKDLTEKIEMAKASNEIIGNFISMLESMNGEITEFRDSIWSGTVESMTIHSKGKATVTFKGGIEVEVQ

SEQ ID NO: 6627 - protein, 538 aa, unidentified
  source 1..538: note = uncultivated organism
MSDKKIRCAIYTRKSTEEGLEQEFNSLQAQREACESYIKSQKHEHWQLLPTEYDDGGYSGGNMERPALKRLLTDIQNGLIDIIIVYKIDRLTRSLMDFSKIVEVLDKHNASFVSITQHFNTTTSMGRLTLNMLLSFAQFEREVTGERIRDKISASKKKGMWMGGKPPLGYYRKDKKIYPDEEKVPLVRSIFEKYIEFKSTTPLKEWLNKQGHNISVGNLNCILRNKAYIGLVGHKGIWYPGEHEGIIPIELFEQVQTVMADNRINRQHYDPSKSLLSGKLYDDKDNAMSPSWSTGCSGKTYRYYVSQAIIRKEPSKLGKIGKVSLSQLENFIDSWFSEFLKDKNIIYPYIQKFGVSKQKEIIKRLPSYPITRDIEKTLIKRVKLNPNKIEITLYQEQVTELLNAIYENREMRQLKPEELKQESTYTEPYHIGTIANGEKIIVGQFVEPKKRPNTELIKILNQAYIWHQDVINGTSTQDIAKRDKVCVQYVRRILNLSFLSPKIVRAILNGTQPADCTLKKLLSIKSSNWYEQEKIFYK

SEQ ID NO: 6628 - protein, 520 aa, unidentified
  source 1..520: note = uncultivated organism
MENAVITIAPSIKSKPVLRVAAYCRVSSDSSDQLHSFAAQVQYYTKFISENGQMELADVYADEGVTGTKTAKRDDFNRLVADCKKGKIDRVITKSVSRFARNTADALMYARLLREYGVTVLFEKENIDTAYMSSELLLALSGAQAQEESLSISKNMRWSAERRMKSGTYLSSSTPYGYELKDGAFHIVESEAEIVRLIFKSFLSGMGKKAIADMLGEMGAPKRFGYETWRINTVGYILTNERYIGDALFQKKYTTDTLPFVKKRNRGEKAQYYVEGTNPPIIPKEDFEAAQELIRQSRITERSRPVSRPLTRKIHCPCGAVYTSISVNGKPYWGCKTHDLDSKKCSARRLPEKDIYEAFITMVNKLRNCRGEILPAAITQTECLQMKAGGTTARIREIDKEIAELNNKNLVLARLNTKGILRPAEYAEQSGVLNSRVNALRAERRQLLQEQDENSVLSGLRRLNGLLMGMETSLTEFNEELFEAMVEEITVPTDTSLCFRLIGGLPLTETIPDRRRCKNQ

SEQ ID NO: 6629 - protein, 572 aa, unidentified
  source 1..572: note = uncultivated organism
MLVKVIPAVQTHRISQAASVKLLRVAAYARVSTELEEQENSYQAQCEHYRKYIAEHEGWTLVDVYADEGLSGVSTKCRDEFNRMIADCESGAIDLVITKSISRFSRNTLDCLQNVRKLKALGISVIFEKEGINTLGESGELFLTIMASIAQQESASISQNVRMGWQYQFQQGKPLLVHTRFLGYTKSRGDDKLTLVPEEAKIVRMIYRDFLEGFSFGQIKFRLESLGISTPTGIKEWSTNTVISILKNEKYMGDLLLQKNYVKDFLTKKEVVNDGALPQYYVENAHDPIVPKEIFSRVQGEIIRRERIYEESGTKSLPSSRRSLFGQVKCGNCSAVYRRVKTRQKNPYYAWYARHDSSCTCRRSLREADLHRYVVNAFNLIPECKTDIIRARERLLYGSLGRIQIEINGIDKRKKELDTVISDYAETGAIPNELLYKYSDGTGDAERAIERIKYESDELELIRADKLVEKGPLAVRDMQLHTLIKLSEAICRSTPHEFCKIVGEKKSDSDTFYENPDACYTVDDFYHRTDIIPQSGEITEFDDSLTARFIENIEVYSDHLLVIFKAGIAITV

SEQ ID NO: 6630 - protein, 545 aa, unidentified
  source 1..545: note = uncultivated organism
MDKPSKKLLRCAIYTRKSTEHNLDLEFNSLDAQREACEAYVKSQTHEGWHCIHDRYDDGAFSGASLDRPALQQLLAKVRAGKIDVIVVYKVDRLTRSLADFAKLVELFDGHGVSFVSVTQSFNTTSSMGRLTLNVLLSFAQFEREVIGERVRDKIAASKRKGIWVGGPVPLGYASVSKKIVVVPKEAETVRFIFRRYLELESTGALIQDLDRNGIRTKRQTITGGRIRGGIPFRMSSLTHLLHNRFYIGEIFYRGAIHPGEHAPILDRDLFEAVQAKLAANSVERRLKLRASPAILVGRLFDDRGNRMTPSHSNKRGVRYRYYISQAIVKHRRNKVGRISRVPAPEIEAIVLEALRKHLAISAGSMGSATTNDRDLVERHLERIIITPDAIELYPAEPNTKSEDEISDKSNAHKDAPAQTKLILPWSRGDFRAVKGILHIPSQASPMAAETSDVLLAAIAKARDWINDLVEGRARSFTEIATREGKVERHIRFLAPLAFLSPKIISAIVRRTAPADLTVTDLAKGLPLSWTRQEHQIGLRITTVR

SEQ ID NO: 6631 - protein, 532 aa, unidentified
  source 1..532: note = uncultivated organism
MPKIKCAVYVRKSTEHGLEQEFNSLDNQEQACRAYIASQSFNDWEYYKTYADGGISGGTMERPALKQMLDDMARGLVNTVVVYKVDRLSRSILDFHNMMRYFDRHNANFVSITQSFDTSTSMGKLTLNMLLSFAQFEREVSSERVRDKLRASKAKGMWIGGCPPLGYDVVNKKLVINPTEAAQIKAIFELYLQMKSVQDLVRHLPTIGIYAKKWTTHGGRVIGGNSIKKMALHRMLRSKIYLGYVECKVTGTTARGEHTPIITQELFDAVQLELENNSNHKSGRTSGSPNLLSGRLYNADGTRFTNQSTVRPRRPTIYYYASLGEYLPARDVDALATDTIVEFLNSDLSTLPDVLVHTLKQIDYGGLDYMARRRLIQTLIRRAIYAPNKITFFINTGTDTLRAFMRPDYINTHNNKIDFMRNGDDLILTRPVVLNKWTGSNKYNAGRAGLMTRTDNHNMIVRAFATAWRYRMAYEKHGDLEYVIKSEQTSWRSLYRYLNLAYMHPEKVNNILSGKEPCSVAEIFAIAPKHQI

SEQ ID NO: 6632 - protein, 577 aa, unidentified
  source 1..577: note = uncultivated organism
MAQKQTQSNESKPIYIVYARKSKFTGKGESIQNQIDCCVEKIHRITKDSPISDEQIWIFKDEGFSGGNMERPEFQKMMDLCHSKSKNIKAVVCYKLDRFSRSISDFSAAFDELNKMKIEFVSVSDDFDTTTATGKAVIMLVTVFAEFERNILAERIRDNKEGLAKTGRWLGGTTPMGYKSTRITYQHDIFDRERTMCYLETIPQEKEIVQKIFHDYLKYHSLSKIETSLRLAEIKTKTNHYYSLSSIRAILTNPVYMSADQDAWNYFVQHDCPPYADKDMYTGKYGIMAYNKTEQLPHKHAKLKDIKEWIVAIGKHEPFVSGKDWVSVQTLLQQNASKTYRSSKSSRGLLSGLVFCGNCGAYMRPKMYRHFTPEGLKKFSYLCETKDKSRQHQCQMKNLPGEIDTLVCNAVKDLAENKKYLEQELLSHLNEQTETSTLSIKSNLALLKEQLKSVDSQINNLVQNLASMTGPAVDLVNIQINELSEKSKHLKQEIDYQQTILSQSLSPQTELNMIVEKLDRFSEVFDMLSFEEKRSTLKMLIKKVVWDGSEVHLYFIGTDSDEVLFPNKKEPQQQDCQ

SEQ ID NO: 6633 - protein, 551 aa, unidentified
  source 1..551: note = uncultivated organism
MKVIAIYSRKSKSTDRGESIITQMKLCEEYIKKNYFDEEIKIIYYNEGEGKSGADSQRIKFNKLMRDAKEKKYNVLICYRLDRVARNVSDFSDLIDELTSYNISFISVKEQFDTTTPMGRAMMYIASVFAQLEREIGAERIKDNLTELAKSGRWLGGTTPTGYKSIGFETIQIKEINENNEIEKKRKKAYKLEKQKEEVDLIELLFRKIEDLKSLTAVETYLINNNILTKNGKRYTRFTLSNIYRNIVYAKNDIEMYQYLKEKNIEVYAVEQDFNGKQGMIAYNKTKQQKHKSVIKNEMDEWIISVGKHEGYIDGKRWINIQNILDRNQNKRYRRPRKNKALLSGILKCECNGYMRPKISSGRTDQYGNDRFFYMCEIKELSRLHKCDIKNIDGNELDRELLMQMKQWYAPNFKIVKELKGIVNNKCEQTENEIEIDRLSKLYKKNEKNLINLIDRIKYIDISLIDDINKEIKSLKEENKQINESINELMKNYNNYNLEIPEDKISELAIQVIEKSFKAFYGLDILEQRKILRMFISKAVWNGEYVQIDFF

SEQ ID NO: 6634 - protein, 567 aa, unidentified
  source 1..567: note = uncultivated organism
MKAAIYARVSTEEQAQNFSIENQLERIRKYCEDKGYHILEEYVDPGYSGTMLRRPALSKMMDDARAKVFDIVLVYKLDRLFRSNRHMYNTLAEFEELGIQFASVTESFDTTTAMGKAYLGMASTFAEWERNTFMERSRDGIGKAIQKGHYSGGIIPYGYQLNSDTKKLEINEEEAHVVRQMFYWLNEKRMTCYSIAKLLNALRIPTRYSKDKRGVRGKATANLWRPGRVYNMLRNPTYKGEWIYGKRTKKRQPSLVTTTCPAITNPHTFDEAQSRLKENNLWSDRNSRRFYVLRGLVKCDSCGHSYCGYYSHSTKSGELRYYRCNRNGNRGSLLSQKCDSPSIPAELLEDLVWKQISEFVQNPDTVKRVIANRLQSMSREDCRIEIDDAEQRIEELLEAEKRLLRLYADPRNRFSKEALDAQLEEVIQSRELLKRQIRELTETQANEKERRKRLENVDFILNKLRKSVQEATPEIKREVIENLLLEVRVGKDCDGNICLKIVYAFDQDSLLPSYHNDTGDGEQNYQLHSARTWVHGGYQHKVSWESNATLSPTNSYYPILQGLAQYL

SEQ ID NO: 6635 - protein, 529 aa, unidentified
  source 1..529: note = uncultivated organism
MKMQDNLSKASGEKKILHCAIYTRKSHEEGLEQEFNSLDAQRESAEAYIESQKLLGWKALPDRYDDGGYSGGTMERPALQRLMADIDAGKVDVIVVYKIDRLSRALLDFTKMIDMFNDRGVCFVSVTQQISTTDSTGRMMLNVLMTFAQYEREVIAERIRDKVAAAKRRGKYCGGVPILGYDVDRENKKLVVNHEEAQVVQYIFRRFIQLGSAKKMGRELNAQGYRTKTWTTKKGKVRKRVKWNTGHIYRLLNNRVYIGEIVHKEKNYPGEHEGIVDQKTWDKVQAILADNKQVKVSMARTKIVAPLKGVIRCGHCGCSMGPTYTRKNDRQYTYYICQKDAKRSVSRCPLKRVPAGDIEQAVVEQLSAVFRTPTLVAKTYFAAREIESVEKDRLIRQKNQLEEELAQARRQALELMKPENDQPNKDKMLATVNSRVVGLSKQLTHVASRCKAYQCSKITEQDVSEAFQNVETFWQDLFPVERNRLIRLLVDKVEIRETGIDMELRTNGLTTLIAELAGLACEVNERRAN

SEQ ID NO: 6636 - protein, 578 aa, unidentified
  source 1..578: note = uncultivated organism
MKRKLSDTLNKQKAALYIRVSTHWQIDKDSLPLQREDLTNYTKYALGIDSYEIFEDAGYSAKNTDRPAYQQMMARMRTGEFTHLVVWKIDRISRNLLDFAAMYDEIKKLGVTFVSKNEQFDTSSAMGEAMLKIILVFAELERNMTSERVSAVMLSRAGNGLWNGGKIPYGYDYNEETGVFSINKNEAEIVRFMYNYYEQERSLLKVAKNLNERGIPTRKGNTWSPVTVSIILKSPFYIGTMRYNYLRESKRSNVKPESEWILIEDHHPAIIEKEQWIRVSEYLSENQRNRKNSSKTYSRKNIHIFAGLLKCGYCGSGMPSTVDRARSDGWRPSIYSCSRKRRFNDCPNKYISDITLGPFVLNYIANMMKAQRSFGKTTSIEVLEKKLLRGDTFSDVEHIDRPGLEELYNSLRAGKTTSVDYVTPAVSSDIYSSGEDRERDLLVSEKRKKERALARLKSLYLYDEEAISEKDYLVEQKKLKDSIKEIDKRLEEIEKNSSLHFTLSDEEFMAKASYFIMSQQLTDKRHIDYEKFIRKIDPKIVKDFLNSIVQNFCIKNGKIVSIRFKNGLEHRFLYKSEE

SEQ ID NO: 6637 - protein, 536 aa, unidentified
  source 1..536: note = uncultivated organism
MKRVAAYARVSTDKDDQTNSFESQVRYFKSYIDREDGWELVKIYADEGISGTQTVKRQGFNDMIADALSGKIDLIITKEVSRFARNVLDSIAYTRKLRDHGVYIRFVLDGIDTEQADAELRLTFMSALAQEESRKTSERVKWGQKRQMEKGVVFGRSMLGYQVEGGKLYLVEEEARIVRLIFHKYLVEGKGTHVIARELKEAGIMPYRPDGHKKFKNDWSNTVILRILRNEKYVGDLCQKKTWTKSFLDHKKRYNRGEEDMVYIKDHHPDIAIVDRETWEETQKELERRSSTPEQKAKHSNRYWASGKVFCGVCGERFLGRKKNTSLGVTRAWACSTHAKAAAFRVAECSMSEWASDKSLKACVLYVLGLLIQDKESILREIHNEIKRMTQEPDSSDTLGEVEARIDDLESKKVKLIDLRLADEITSEELKMQKESIDEEISTLKEQLSDLKDKAEKGVSQNKRIQTILAEAENLLRFEKEEAETMLGTVLEKIIVYEGHTVEVYLKDIPLVFRLKYVSTGKLDSYRTQIISCDVS

SEQ ID NO: 6638 - protein, 564 aa, unidentified
  source 1..564: note = uncultivated organism
MSNKLRYRCAVYTRKSHEDGLDQDFNSLDAQREACEAYILSQAGLGWEVSSKVYEDGGVSGGHMERDGLKQLLSDIKTGTIDVVVVYKVDRLTRSITDFGKLVEVFDEQDVSFVSVTQAFNTANSMGRLTLNVLLSFAQFEREVTAERIRDKIASSKQKGMWMGGRVPFGYRNEDKKLISEHKEAETVRLMFDLYQEHKSIRLVKEKLDRRKIVSRMRTNKAGLQTGGASFSTGNIASILNNPIYMGHIKHKDKIYQGNHEAIITKDQWQLVQAIRSDNIIKLEHSKNHSTPALLNGLIFDEHQNPLICHHANKKGKRYYYYVSKDVDAESSTNQTGLRIPIRMLEQTILDLIIHEFTNEVALLELIKVKNLSAEEINSLITNGKKLVSKLTKTSRSELRVLLKELITRIDIGSAQIELQLNTSLLTSKLKLKLNIPADKQVKLTKPIRLRKRGQEMKLVLGGIKSQTANKDQTLIALIAKAHLLREELETQTVASIKEFANKYKIDHADAKNLVPFSYLSPYIVEEVLAGRQPANLNTKRLKSVGNHLPLIWEEQHQVLGFAY

SEQ ID NO: 6639 - protein, 567 aa, unidentified
  source 1..567: note = uncultivated organism
MKPLAILYTRISSVQQVDGYSLVSQEALCREFAVQCGYSVVEVIQDVISGEQLERPGLSRVFDLVSEAGVRHIIVLNVERLTRGGPAHYAMIAARLAQDDARVEFVMGNYDAGSPEAMLAMQIASTVAWYDNQLRRERTVRGSLQAAKNDKVQVGARPPYGYAAQDGALVFDVDEAAVVRRIFAWALEGVSANEITRRLCADRTPTRADKDAFLQKKNNVGIWNGSAVKKILHNRTYTGVWTYRKTRTVRIEGKVRLRDRPVKEHIPIPVPAIIDVAVFDAVQEQLAGRRATRRSNPTPDVLLQSRLLCTCGRVCEVAEMQGYFTYRCRSRSRRQWEGDCTRKTYERAAFVDAAVWQAVAAYLLDPHKLGAWVSAWRAMQEPVLAENRSLLRAAVDAKRDVERKLAILLDQMLEKGYAADVLEEERQALLWTHRQLGEEIAALQVRLERMEISKAQEVMLLGLAERLRQGLTAIDLAGQRQVLDLLQIRIHMVANQTARIEALLPFDVDRVTWERPGRAKARGGSGASGTVTEEHKGNENGIATTVSERCDHPNTPLPAPVWHVPAL

SEQ ID NO: 6640 - protein, 507 aa, unidentified
  source 1..507: note = uncultivated organism
MRAFLYCRVSTQEQACDDHYSLGNQEQRCREYIKHKSWQLVKVLKDVASGKSAQRESYQELLRAIREHRVDVVVVYRLDRLSRSVVDIYNSLDLFRTHTVGFVSVQEAFDTTTAMGRAMLGVAAVFAQLTREMISENTKDGLARRAQAGKYVGGGATTPYGYRLVEGKLEVMEPEAEVVRRVYRMYTDQGWGPGKIAAVLNQDNVPTRQGLQGHWRPMAVGHMLRNPAYAGRIRMNDNNFSGEHEAIISEELFAATQSLIEERSKLAPRGRSSPHLLSGIARCGTCGWRLGIHQTLRGPGKPAYLTYRHPPNHLKGEKACLGVNKSAHRLEELVVAEVRRLAQSPELRRAALAEAEREVAAKVNPLAAEREELLATLASGEQAFDQWADRLSRGLIDEEQFARLNQAHLEDKRKARERLAKIEVEASEGGNLAVSLAEVEQVLEDFNRTWEEMSGDERREVMRSLVEYLKVYPDHAELKLIFQPEVRLDLSFGRSRGREASAAVGQA

SEQ ID NO: 6641 - protein, 530 aa, unidentified
  source 1..530: note = uncultivated organism
MQWYENQAKYHPNWTVLKSYIDRGITGTQAKKRPAFMEMLDDAKYHKFDLIVTREVCRFARNTVDTLVITRQLKEIGIEVYFVEDNIWTMDNDGELRLTIMATLAQEESRKTSERVRAGQKISRDNGVLYGNGNILGYDRLGDTYVINEDQAETVRIIYDLYLKGNGFNKIVNELVRLKRKDSSGMVRWDATKVSRILHNATYKGYQGYYKSHKNIAAKNPNWYILKKYIDEGITGTQAKKRPAFLQMVQDAKQKKFDLIVTREVCRFARNTVDTLVVTRELKNYGVEVYFVEDNIRTMDGDGELRLTIMATLAQEESRKISERVRAGQKISRDKGVLFGNGNILGYDRDKAKGTYVINPEQAETVRMIYDMYSAGKGMSQIRNELIRLKRKDSSGLVRWENCKIARILHNSTYKGYPAYLKSRRNNFLDQKIIRNRDEGTYLYVKGDFEPIISEEQWERCRQIREQRVRRNKILTENGEKSLLTGVHTSDDVWTKKLRCRCGYRMRRNKWRKNRNGELIYGYKCYASQE

SEQ ID NO: 6642 - protein, 562 aa, unidentified
  source 1..562: note = uncultivated organism
MGKRDAGTQDNRPRSKVRCAIYTRKSTEDGLEQEFNSLDAQYEACAAYIASQQHEGWELVPNRYDDGGFSGGNLKRPGLTQLLADVASGRVQVIVLYKIDRLTRSLSDFSRIVDVLDKADASFVSVTQSFNTTTSMGRLTLNMLLSFAQFEREATGERIRDKVAASKKKGMWMGGPVPLGYEVKERKLIINEAEADKIRHIFRRYAELGTGQKLLDELREQGVRTKLRTMANGKQRGGISFERGALFHLLGNRIYIGEITHKGASYAGEHDAIIESELWDQVQKQIGANKINRKSGRNARAPSLLAGIIFDGHGRRMTPSHAVKSGKRYRYYVTHPSSIKEGKAAWRLPAYDLEKGVVQRLIKLLEDRQAISGIVSSSDAKTLARTFEQAGSAAEKLKTSTFHRRTMVASLVQRVQIRDDEISITLDRAGMEVTLYVSVHTDHPLHITASACRFRRGEEVRLIVGEDAAARPDQPLISLLTEARSVRDKLCAKPDQTIKTYAIATGQCRKRLARLLGLNWLAPEIVTAILDGSQPPALTPRILLRTKLPLDWEAQKTTLGFA

SEQ ID NO: 6643 - protein, 518 aa, unidentified
  source 1..518: note = uncultivated organism
MNRKKEKPPAAKALRCAIYTRKSTAEGLEQEFNSLDAQRDAGESYIRSQQHEVWVCLPSQYDDGGFTGANMERPALRRLLADIEAGKVDCVVVYKVDRLSRSLLDFARIMETFERRKVSFVSVTQAFNTATSMGRLMLNVLLSFAHFEREMIGERTRDKIAAARRKGKWSGGMPILGYTVVQTKLVVDDEEAQRVRQIFELYLERQSLLAVVKELNGRDWRTKCWTTRKGTIRGGRPFDKSALYDLLTNVAYLGKIRYKDEVHAGEHRPILDADLFAQVQAMLQRNGRSGGRAVRNKHNALLRGLLHCAACDCGMNHTYTAKGSRQYRYYVCHRAQKRGWQVCPSPSIPAGEIERFVIDQIKCVGRDPLVIKETLAQTRRQAEERIEALAAERARLRGQLRDDHVELARLASTARPGDPRLLDAHDGIRAAEQRVTEIDDELVTREGDLVDEADVAAALADFDAMWGCLAPREQARVVELVIEHVAYDGKAGSISITFRPAGIKELAGELAKRKVEAA

SEQ ID NO: 6644 - protein, 546 aa, unidentified
  source 1..546: note = uncultivated organism
MPDIKNQDRACALYVRVSSRNQAEEGDSLDEQAQALIYHCLSKEWKKYTVYREEGVSGKDTKRPAFQRMLADIDKRIINTVIAKKADRLSRNLLDFENLLINFEAKGVDLVSVQENFDTSTATGRGFMRMLLTFAQMEREQTSERTIDVMEYRAKQGMFNGGHPRLGYDIDTENKGLVLNESELPLAKEVFTTYIKLGSLSATASDLNRRGYRLKKWTTSAGKTIGGGQFQKNSVGRILNDPIYIGKVRYKEALYDGQHQAIIRDELFNAAQSILQANKVTKTGYRQADDNTFVLKGLVRCGSCRAGMSPSFTAPKGKKYFYYRCTTNNDQSQASCRIGSVNARRLEELVINELKFLSEDTQVIEGVVEKATKDQRVQAKALAAKRKTLADKLPQIDKRAKNLLEVLGKGGAKVTAGGGYIVQELDALGLQASQLRDEIVAIDLEVNNIENKTISAARIRDGFKVFNDIYDNLTTDEKYDLVHLLVRQVTYYEEESADKDGKKVGKIKMALWELPAIEPSELSSTKSFAERTFWLPNPDSNQGHSG

SEQ ID NO: 6645 - protein, 1282 aa, unidentified
  source 1..1282: note = uncultivated organism
MDQRDKAMWVHTLWDPLDEMHQSPLNSKKEGIRVAAYCRISKGNTNYRSLENQVSYYSNYIYNKPNWKFVGVYIDNQISGGTIEHRNGFKRMLRHAREGKIDLILTKSISRFSRNTKEILEVLQQLKESGTTVFFEREGVEVSKGLSSLVLETHAAMAQDFIEGVSNLVKFSYQKRLNEGRPYFHEMYGYDLVEPGGKDMVKINEEEAEVVRWIFNQFIGGATYADITRELIHRGIKTKKGNDRWAHTQIRKIINAIAYTGNKRAKAQTKDLFTGKITGSGPYKDQYMIENSHPAIISMDVFNRAQARVKKNKRTKKQIRTPISNPLKYRVFCGRCGKLVRRKNDYRYGCAYTNASVKLCDLELIKTYDLVAMGLRGLFERMLGLTIIATKNRKDITYEMVDPLGRSEKTLKEDFRLMLRDLERILIRVNQNDHFEFQRLKYFTDIEIAKRQNQIELIEQLEDEYSSFEEKVGRIEDDREYRNDALVWLRTIRGIDHFINSATIEMVRAWMTKLIIYSGSAYVIEWIDEKTTTIGQKEIPGIVEAAENKRLERESRLKKQEKPLLNDLINFEAAEDSLKDNENSKARRKEELLVEATAITADSKSLAKINNQNIPMRDVVVLERGLSIKDLGDLKKNILKNRMSQLKQEEKKKLRVAAYCRVSTEMDEQKLSLQTQLAYYNYKILSNPLWELAGIYADEGVSGTITEHRDDFNRMIEDAKKGKIDMIITKSISRFSRNVVDVLGTLKTLHELEPPCVCYFEKENLKSNDPNSSLILSLMATVAEEEIVSLSNSITWGVQSLAQRGTISRRTDMYGYTIDKNREWHIVEEEAEAVRLMYQLFIEGKNIFEIVEHLNELGIKSPKGSDYWNYNTIREILRNEKYLGDYEFQKYYTKVAGSVRKANYGQVPKYYIEEHHQAIIDRETFENAQKVFEDRKRNPVKNERKDGTAGREIYYKKFTCAECGHVVARYRSTTYYSREGSAWRCFNSFQKLGSTCNVSISFDERYMDYCFVDTLRKIKTSEDFRHQIKAHLRKLDLTKKELQHKEHLEKQMEALNQELYKAVDTEIQKNGKNTQLINQITDDIIQLREQHYKYIERLEQLEEDKERLEKLLKYCEKMKPFSLKTFHNMRPRIKPGDSVYSKTNSARDVSYMDLEGEDHLPEEVFIEYVLSATIDKAGEIKFKFAEGAEFGSGLDYEKYKERFEKQKKKIQMEELLISAEVQEVKEFCKEYRKPKEIREHLGIKSEISYRKRIQEPLYKAGKLMTNDAKVTQLRMYRWADEE

SEQ ID NO: 6646 - protein, 573 aa, unidentified
  source 1..573: note = uncultivated organism
MPKPKMERPDTLRCAIYTRKSHEEGLEQDFNSLDAQREACEAYITSQRHEGWTVSPGFYDDGGISGATMERPALQRLLSDIAAGRIDIVVVYKVDRLTRALSDFARIVDTFDENGVSFVSVTQQFNTTTSMGRLTLNVLLSFAQFEREVTAERIRDKIAASKKKGMWMGGVPPLGYEADNRKLVVIEDEAERVRYIFRRYLELGSVLSLKDVLEAEGIVSKVRVSETGKRTGGVPFNRGALYHLLQNRIYLGEITHKGACYPGLHDAIVPQDLWDDVQVLLQEKRVERHSGARTGEPSLLAGLIFDDQGVRMTPSHAVKKGKRYRYYVSRHLTTARKSKAKPGRRTPAGEVEQLVTDRIGRLISDEHAVLAAVQHRTGDPDQQQRTLRTVRAVGVEWRHLEPAERRRILLSLIVRIDVQADRVDIQVRADALANLSLDDDKVRPVADGPVQTLSVPARLKRAGMETRLIVDGPHAEGKTRKPDRSLVRLMLTGQRYHEMVLRADGRSIQQLCDEEGVTRSYFTRALRLAYLSPEIVKRILDGTQPLDMKASTLKAASRLPLDWAEQKALFGIA

SEQ ID NO: 6647 - protein, 511 aa, unidentified
  source 1..511: note = uncultivated organism
MAAMNLPFMDENSRYDVRVVAKYNRKSRGDSEEDLIKHDYILTEMCKRHNWKFVDYPEIGSGDSIELRPVFQRLLQDIEDGLFDAVVVVDWDRLGRGDMGDTDRIKKALQKSNTLVITPSKWYDLNDDDDDFNVDAKAFIARQEYKMIKFRLSRGKKIGARLGRWTNGTPPFPYDYDPMRKGLVVNEQKRIVYRFIIEAALDGHACEEIAWELNKQGIPSPRNKKWTGTTISRLLRDETHLGKIISNKSEGDGHAKKRPNAKKWRKIPKHLWVVVENCHEPVKTQEEHDKLMYLLMKRRKVPTAARAGKHALSGLIRCAICGSVMQIYKTTTKVPQVRTCQHHDHYGNKCRNKGGSAEIIINEIQVKLKQFEEQILSKIDSVEGDESKVLRDSIQQKYREIKKKEEAIERLEEGFEAGLYTAERARQRKIKLEEELNALHEELSVMEKRLKSQESVTNEERLYYIRNFWEQMRNSKTMSDLELNQCHKEIIDSIIWRREDNGPPSIEINFL

SEQ ID NO: 6648 - protein, 508 aa, unidentified
  source 1..508: note = uncultivated organism
MRAVLYARVSTEDQAKNYSIPSQIESMHKFAVEHGFQVVREFVDEGISGAVLDRPALSELRECARQKVIDAVIVYDPDRLSRKLVHLMVLVDEFERHGVELEFVTQSVGQSPEDRMLFGMKGIFAEYERTKLLERTARGKLRKAREGKQPGGQPPYGYKLVDSRHVIEPKEADVVRMVFDWLIKDSMKLRAIQQRLIRLGIPTRKSKAWWQRATLYRIVTDETYAGRWYYNKHMDAPAKTKDGGTVQILKPREQWIPVEVPAIISRETFEAAQRQLARNRELCSRNTKRDYLLSGLLVCGNCGYKLGARTSGRRTYYCCSSKSGNNRPKSCFVKNIRTDRLETVVWDTVAHLLSQPKLIIEQVKNQGQHPTGAYLEASLDRVSQGIERKEIEADRMLDAYKIGAIDLPTLKRKMDAIKSEKARLSEEQARLESELRKYEAQELNDEKLYQFYQSLPTTLTNLDFEDKRQILREVVDRIVVAGDELTIYGIIPAPEDKAKDVLVELPSS

SEQ ID NO: 6649 - protein, 549 aa, unidentified
  source 1..549: note = uncultivated organism
MKLRKEIYRTAMYLRLSKGDLDVDGLDKSESNSITNQRMIVENFLEKNPDLKLVDTYVDDGFTGTNFDRPEMKRMMADVDAGKIDCIVVKDLSRFGRERIETGTYIAKTFKAKGIRFIAINDHYDTLTADGSETHIVMPIKALTNDNFSRDISTKVRSSQEIKREKGEFIGAFAPYGYKKSADNKNLLVPDEYAAKIVASIFADKLEGMSANAIAQKLNDEGVLSPLEYKKKQGQKFTTGFKSGRKALWSSQTVIRILKDEVYAGVLAQGKRARVSYKVRKEIRRPKDEWIRIEDTHKAIVSRETFDSVQLMMDRDTIKAPDGGISLFAGMLFCGDCGKSMVRRVDSRNRERSAHYICSNYNRNKECSRHSICEDDLKEAVEAFLRDHIDKLANARKMSQSIDFLEIGFEAAAEHDRDIVKLKEELLRCSTLKSSLYQDLKEGIINENQFNRYREEYTNREMALQEAIEEQERVIRDIYDGKIASGVQLEEIQGEMNISGLSRTALVTFIDRILVFEGMKLEIVTKYDAVIDKVVRINDGINYGWKEAV

SEQ ID NO: 6650 - protein, 511 aa, unidentified
  source 1..511: note = uncultivated organism
MANKSSGEKSGAPTTVRCAIYTRKSTEEGLGQDFNSLDAQRDAGEAYIRSQAGEGWTLLTDQYDDGGYTGANMERPALRRLLADVQAKKVDCVMVYKVDRLSRSIRDFAKIMEILDKHGATFVSVTQQFNTTTSLGRLTLNILLSFAQFEREIISERTRDKQVLARKRGKWTGGHLPLGYDLETGCLVINDEEAPRVRQIFEWYLEGQTVYGIVAKCGDLGWHNKQWTTKNGKVYGGHPMRKCHVYKMLANPLYAARIRADDEVVAANHARTVDDRTFDLVQEKLKENTRNPGTQHRPNTEALLRGLLYCACCGSAMSPSYSSSKHRRYRYYVCLRATQRNGDGCTTRAVSAPVVEEAVIESVRRFALAPEVVEEAARAARQRLTEELNRYREELKGVNVRVRNAKSQLVRAVEPDATREAGLRELIVVGDAKAEELRKAVARGERLRFDGSMVRQHLGNFDQVWKTMTIEQQVRLLRQLVERVGYDARGDKVKVTYNSNGISEFCKGVSK

SEQ ID NO: 6651 - protein, 550 aa, unidentified
  source 1..550: note = uncultivated organism
MKCGIYTRVSTDNQAEKKFNSCEAQAEKIKSFIRSQENLEIYKIYNDLGYSGASLERPALQGLFKDITEGKIHCVLTYKIDRLTRSPKDFYNLIEFFDKYGVSFISVTENFDTSSPSGRLLRNIMLIFAQFERELTAERTKDKMQQRREKGLWNGGLVPYGYKNIDKKLEIDEKEAEGVRKIFQIFLETQSLAETRRRINQLGYRTKKGNIFCKGSIDNILRNPIYIGKIEHKGKLFDGVHKAIIPEAMFLKVQSLRKVQIRPETKIKRPFLLGGLLKCQECGSVMTPSYTLKQEKKGKRYIYYYRCTKTCKHDWQSCSIKYVNANRVEEFIIAKLTEISKDKSTIEKLVRRINQDEEQRLSPLQEKEKQIQTRINELNTKIKKLVSFLSESDERLFPTVKKELSGLEQEKKILEFDLEGVRLSIQKEKKEKFEAKIVLENLRNFVDRVKEIKDEEKPYLFQYLIKDIVYGKDEIGVNLFYLPNFRANLPAQSQSVGTARATTGGEPISPSFIPSYIGLKNRSKWLPLLDNFQTIPLKFKNEIYHPIQTR

SEQ ID NO: 6652 - protein, 566 aa, unidentified
  source 1..566: note = uncultivated organism
MSKKDNRTIAIYSRKSKFTGKGESIENQIELCRKYIASHYSKDEADTAVVYEDEGFSGGNTDRPQFQQMMSDARSKKISAVVCYRLDRVSRNISDFSGLIQELEKLDVSFISIREDFDTCSPMGRAMMYIASVFSQLERETIAERIRDNMHELAKTGRWLGGTTPTGYASESVSNVTVDGKTKRACKLALIENEAEIVRLIFSKFLETNSLTQTDTFLLQNHITTKNGRDFTRFAIKNILTNPVYMIADEAAYKYLSESGAELFADKTDFDGVCGIMAYNRTEQKHGEANKIRDISEWIVAVGKHKGIISGSDWIKVQTYLEQNRSKSFRKTRSNTALLSGILFCGNCNDYMRPKLTKRTNKDGELVYTYLCNTKERSHSERCDIRNISGNLLDKLVCDEIKKLSEDGSDFIKTIEKAKKEILSGNSEFADNIENLKKNYSENEKAIANLTKTLADNSESTAAEYIIKEIERLHRANEEFLSQINELENIKKRQYIDSSEFDILKDMLSSFGRTMDIMTVEQKRAAIRSCVRKIIWDGENVHMYLYGSEEPIIESAHCVPLSDNSK

SEQ ID NO: 6653 - protein, 546 aa, unidentified
  source 1..546: note = uncultivated organism
MKKQQKAAIYCRVSTIHQVDKYSLPVQKEALISYAQHVLHIASYEIFQDAGFSGKNTKRPAYQDMISRCRSGEFTHILVYKLDRISRSVLDFSLMYNELQKLGVTFISLNDQFDTSTPMGRAMLTISLTFAQMEREVTSERVGNVMLARAKKGIRVGGAAPLGYDWDKTRKTLVINEEEAQTVRYIFSCFKKTHVMYQVMLSCNSQRILTKSGHVWSVKKIRAILTNSVYKGSLVYNRTSTRGKWRRLPPSEWIVVENIFPVIIPPAEFDAIQNYIATRPKPIKLSKRIHLYGKLLYCPCGSCFTARKDKPRACHPIGSSLYTCLSHVLDRGCKESYTPSDIKLTPFIFRYIQNMLYVQSHIDTLQSPSQLESLLLQGDELAAISHVIDLQVIFNSIKKSHRVDYQPPTTIPLQPFQPNNDAKRNRIERALQRLKDLYLYDDESISRDEYVSEKKRLLAQLQALDIPAKPAMPSPPISAAMQNDNLKKLLTGSASITYDTLMAAVGEKIAFDFVHAIISKINLKNRRIHSITFKNGITHEFIYATH

SEQ ID NO: 6654 - protein, 524 aa, unidentified
  source 1..524: note = uncultivated organism
MVCYNQITTISLSLWRVKYMIAIYARKSVERENSISIESQIEYCKFEAKGEKVIIYSDNGYSGKNTNRPEYKRMEEDIKANKIHKVIVYRLDRISRSILDFSNMMHLFQTKNVDFVSATEHFDTSSPMGRAMLNICIVFAQMERETIQQRVTDAYESRSQKGFYMGGKVPYGYKLIPTTINGIQTKMYEAEPEEAEDIKLIYQLYSRPSATLGDVFRELVERGLNINRRGNAWSTARLSDIMRNPAYTFADSKTYDFFKEQHSNIIDSSDCYTGETGLYLYKGENKNRKTWDLSNQNIVVAPHKPLIDSDTWIACRKKLLDNHQVKTCKAKNSFLAGLVKCGHCGYSMTVRKSQRAKSEPVKYFVDSGRTDYHICKDKVSALRVNEFELEIINRMREKINSLTIQKMRTDIKSDNKLIELSAEKEKVQTEIDNLVDTLTTTQNQTTILYIDRKINQLDSKKNEIEMQIETVRREQQNAQNVHEQLKDVMSKWNYLSFDDKRSVTMLLIHKIKVFKDHVEIIWNV

SEQ ID NO: 6655 - protein, 507 aa, unidentified
  source 1..507: note = uncultivated organism
MIALYVRQSVERENSVSIETQLDYCRSMLRPDERETKIVEYIDEGCSGGNTNRSGFQKMMRDIQRNSIQKVIVYKLDRISRSLNDFVGILQIFKEHGVEFVSSQESFDTSTPYGDLILKILMVFAEFERTSIINRVRDAYAKRTDMGLYMGGRQQYGFELQETTLKGIPTKMYVPIPEAVEQLQYMFEVYAQGQVSLRQLQANLLEKGMKPTSGQDWTTAKLSALLRNPVYVKADSDIFDYFHAKGVRIVDDVRSFTGKRAAYLYGKTTHDKNLSDWSDMKLVLAQHEGIIPSEIWLRCQYKLEKNRQVGNSLSNKTSWLSGKLVCEKCGHTMTTIKSQRPDGSYRRYFNCTGRSHKKICSGTKTPIYADDIENIISQYIAEKLKDIGLAKRSVSTQANTQLNQLKLQLKELELQEEQLGDLLISGQLNQDTIQLANRKAETLKKKKQKLLEQIGQAQMQDSELETVIDLSRKWKKAKYQEKKAVAGVLIRSIVIKEDGSLEVIWNI

SEQ ID NO: 6656 - protein, 574 aa, unidentified
  source 1..574: note = uncultivated organism
MAVLSNVRKLSSRKVAIYVRVSTHWQIDKDSLKVQEKELIVYCEMILGIKDYVVFNDPGYSAKNTDRPKYQEMMERIRSGEFTHLLVWKLDRISRNIIDFAMMSEELKQLGVTFVSKNEQFDTSTAMGEAMLQIIMVFAQFERKQTAERVTAVMLSRAEDGEWNGGRVPYGYLWDKEKKEFSINPEQAEAVNQMVQMYLEKQSLLYVARTLNANSIPTRTGAMWSPTSVRTILTNSWYIGQYTYNVHSDGKGYEKRDKSDWITVEHHHEPIMDEDTFYRIKFLLARNRRGGVPAGKTYVRKNIHIFSGLMECGVCGSNMTSTTDRRRANGFQPSQYACSTRRRKGTDCTNKYISDLTVGPFVLNYIANIIRASKTNSESTSQEVLERKLLRGPVFDSVDHVSHDAVQSLISSFAESGDAVEYRPLYAFTKVSKSTMALDKLEAKKRRLSTALARLNTLYLYDEQAMPEKDFILERTKIENQLSDIDKQIEAESGGSMVVDTKNSNFIKKASFYIMANKLIDDYYVDYESFVKSVDPDTLRGFITSVVSRIVATDGKIMSIKFKNGVTHQFTYKQ

SEQ ID NO: 6657 - protein, 519 aa, unidentified
  source 1..519: note = uncultivated organism
MTNPVKTNPGAIRCAIYTRKSTEEGLEQEFNTLDAQRESAEAYIASQRHEGWACLPDRYDDGGFSGGNLERPALKRLMADIETGGIDCIVVYKVDRLSRSLLDFSRLMEVFERHGVSFVSVTQQFNTTQSMGRLTLNILLSFAQFEREIIAERTKDKMWAARKKGKWIGGMPVLGYDVAEGGGRLEINAEEAARVRAIFQLYLEMESLLPSAQELERRGWNNKRWVTRKGKERGGKPFNKSTLFRLLTNPIYTGKVLFQGTTYDGEHEAIVDMETWNKVQGILRRNRLNGGTLVRNKYGALLKGLLFCTPCGTGMTHSYAKRKNGKCYRYYVCQTAQQQGWAKCPTKSVNAYDIESAVVEHIKGLGANPAILSATLTKATEQAKARLNELEMERKSAERELKRLHAQIRKLLGGALPDGASEIATDRLADLQERIRTIEQRMKAIQEEILVLGKTTIKENDLTQALADFDAVWNSLSSKEQAKIIHLLVERVGFDGRDQSVTVTFRSEGLKQLCQRTAA

SEQ ID NO: 6658 - protein, 521 aa, unidentified
  source 1..521: note = uncultivated organism
MSVKTKTAQATIRCAIYTRKSSEEGLDQEYNSLHAQRDAAEAYIASQKAEGWEALPDHYDDGGYSGGSMERPALDRLLRDIERGKVDCVIVYKVDRLSRSLLDFARIMETFDNHGVSFVSVTQQFNTTHSMGRLTLNILLSFAQFEREIIGERIRDKLAAQARKGKWTGGIPVLGYDVDRSGPSPRLLVNAKEATRVREIFRMYLQEASLLSVVKELAKRRWLNKRYVTKKGREMGGRAFDKCALRTLLKNPLYVGKMVYKDELHPGEHEAIIEQDVFDKVQEQFDYNRRTGGLEVRNKYGALLRGLLRCKSCGTAMSHTFSGKSKRHFNRYYRCTHAIKNGHDVCPVGCVPAGEMERVVVEEVRGLGKDEALLAQVLADAHATIETELAEAKRERDALCRERARHHEELQQLATSGRTSTDVTGRIAELHERLTVADQRMPGIEARVAELEAQTVTPEDARAAFADFDEFWKNLIPREQARLLKLLISTVEYDAEAGTVSVTFRPTSIRSLIDRKLEDAA

SEQ ID NO: 6659 - protein, 536 aa, unidentified
  source 1..536: note = uncultivated organism
MNEKRAVVYSRVSTSEQADEGYSIAAQIEATKNIARYSGYEVIDTYVDAGISGKSMENRPAFLKMLADAKSKKFDMIIVWKLNRLSRNHLDLLKIYEELEACNVSFKSVSEPFDTGNPAGKLLFNMLASIGEFERETIVENVKNGMKQKAKEGFFNGGRMLGYESKAIVGDVKNKLSIIEEEAIIVRLIFELYTKGKGYKYISSKLNALNYKTIKGNLFNIQAVRGIITNPTYAGKIRFNKYVDHKKNRRRGNKSEFVLAVGQHEPIIDSETWNKAESLLKERTGRSKKIHKGVFLLTGLLKCPVCGSSMVAGRVTRKNNDGTKTKYNYYQCSRYKNYGRHECSANSVKAEYAEKYVLDRIAGFAFDDELIEEVVNGINNSVESTVKPIMKRIEQLDKDMQSYSDKKERIFRLYEDNIIDQITLKARIDKLEQEYQETKNHKEYLMEQIDKTQVVKEIPIKLVQDLLSNLGRVLDVSSREQTKMILNMVVEQISVDGKKKINEIKLRFNESSQKIFTAEESSDEDSSIFMSFTVSI

SEQ ID NO: 6660 - protein, 608 aa, unidentified
  source 1..608: note = uncultivated organism
MIKENRQQQIAIYSRVSSQEQSVEGVSIEAQLAVLRAYAKSQGWEVVEEYVDRGFSGGTDDRPALKRLLTDAGRHRFSIVAVGKLDRFFRNLRLLLNHLHGLEQLGVKFVSTQEGLDTSTPYGKFAVQIMGVIAEFERGRISERVRDSRRYLISQGNWPGGRPLYGYKWLPKERKWEIVPGEVKIVRRIYDLYLKKKIGMDTIAAILNKDGVHTRDGAEWRFSVVRKILTHPGYKGRHRIGIPMPVIIDESTWQKVQEKRENARSVQVDPKGWLLQGMCFCGDCGHVLKCMRKKPDDHRYYACRGRVNRNSQSEKRCNLPYIRADWLERSVFEKVREVLNDSGKLVECINKSLIELEERRKEIGAESMAVDSKLEAIRTKEERLGMAFADGAVSESAYRTKLKRFKNEETEFLKCQRNIDPRELGEAVSLGISIDMVKDVLNRGSDDLSNYDILNQVDDILDALDANISKNDNPGRSPSDIEESDLTQDIQPVVTEAIELQRNQRALLQKFNIKVIVYPNRLVIKGAIPTQILDKAKKEDTARIISSASRGKGRSLLRGLARTPINRDQTSGIVPPRQVTNKPKENLLNAARLSKDTAPRYLRRTIKL

SEQ ID NO: 6661 - protein, 565 aa, unidentified
  source 1..565: note = uncultivated organism
MKAAIYSRKSKFTEEGESIENQINMCIKYAENILGVHEYEIYEDEGFSGGNVNRPNFKRLMKDIQNNKFSHLVCYRLDRISRNVADFTSTLEILNKHNCSFISIKEQFDTSSAMGRAMMNISATFAQLERETIAERIKDNLRELSKTGRWLGGPAPLGYKSIEVENNDSAGKNRKKHILSINENEIGIVKLVYELFLKYKSFQKVSSILENQGIYSRKGSVFSRELVKQLINNPVYVIADDKILNYFKSKGCEIYRTGYINGSNGVMPYNRRKENGSFAPIEDWLISIGEHPGIITSDVWIECQDICEEIKAKASNRQFTSQNALLSGLVICAHCGSSMAPRKQKNKLTDGSESMYRYYTCNLKNKAGNRCDNVSLNAYEAEDYVVKKIKSMTYDDLLSLYLSSKEKTVIKINNNNSILQLKKQIDDNKIAISKIIRKIARLDEDDESDNALINDYESEIKNINSENKVLENKILELQEENENISDLKKDISQIVELFDTFKKFYDCTEDFEDKKRLIASVVKFVVWDSDSNSLQVVPIGSALERKDFGNSAFRSTEQKKWPMLR

SEQ ID NO: 6662 - protein, 544 aa, unidentified
  source 1..544: note = uncultivated organism
MKPSERKVFRCAIYTRKSTEHNLDLEFNSLDAQREACEAYVKSQAHEGWRLVADHYDDGGISGASLERPALQTLLADLRARKINTVVVYKVDRLTRSLADFAKLVELFDQYEVSFVSITQSFNTTSSMGRLTLNVLLSFAQFEREVIGERVRDKIAASKRKGIWVGGPVPLGYRVINKKLVVVPEEAEAVRIIFTGYLQLGSIGALIEDLDRRGIRTKANGRPDDRQRGGIRFGVGSLAHLIKNRFYIGEVVYRGAIHRGEHEPILDRELFEAVQAKLIANTVTRQVRLKGSPAILTGRIFDDRGNRMSPSHSNKLGVRYRYYVSHAILQKRKADAGSVARVPAAEIEKLVLDGVRKHCVSMGATEDPTAIADRDLIERHVHSVTVKPQALEVSLVLARDTLVSTEEPSPNDPTTDQLATTTTITTLPWTAPIFAAVKGIVHVPSEKPAMKPESREALLTAIAKARRWIDDIQLGRIAFFSEIAKREGQGERHIRLLAPLAFVSPRIIAAIVDGSAPADLTVTGLARALPYSWAVQEQAIGLLQ

SEQ ID NO: 6663 - protein, 503 aa, unidentified
  source 1..503: note = uncultivated organism
MFNSDSRFDAIYCRQSVEKEDSLSIQTQMDFAEKLCSGEIRYYSDPGYSGKNIKRPDMQRLMQDVQSGKIRKVVIYRLDRLTRSLFDLVDLWKVFDNHNVSFVSATEQLDTSTSIGKMFVMLMIMIAEWERENTVKRITDNYYKRAELGRWVGGPSPFSYELSTFVLQGQSIKSLDVNWERMDLEIEIRKKYLDPNVSLGKIKKELNEKGIKTNAGKNWSENTLSRIMRNPASVKATPAIYAFFKQLGTEITSPIDQFTGEFGCLLVGKSGASTRQRKKIAEAKLSVGSWPGVIEPDLYLKNMERLQSNIRLGRTGTGLNTWLSGIIKCPFCEKAMAVKHYTDRNDIRRSYLWCTGRYTDICEHKSDLRIYEVEQVLEREIQILLDEAEPEEIVPAVSGDEIAIQVELVKIDEKITKALETIYANGVSDTVISYINKTVESLDRQKEALNQELNQILHKKSKSYVPEKLVFQELNFDEKKAIAKTYLERVYIDKDFIDVIWKI

SEQ ID NO: 6664 - protein, 545 aa, unidentified
  source 1..545: note = uncultivated organism
MPEMLDKDRKCALYVRVSTTNQAEEGESLDEQTQKLKGYCSYKNWKHYTVYREEGFSGKDLKRPAFQRMMADIQREKINTVIVKKIDRLSRSIIDFENVYKLFDDKGIDLISIQENFDTSTAIGRSVIRIVLIFAQLEREQTSERTIDVMAYRAKQGLFNGGYPRLGYDIDYEKKSLVPNKSETPIVNEIFTTYIKLGSLSETAKELNNKGYRLKSWTTSAGKKRVGEKFQKNNVSRILNDPVYIGKVKYKNSIYDGQHKAIIKDDLFYSVQTILHANNVTKTGYRQKDGNNFFLKGLLYCGSCRSAMTPSFAYSHGKKYFYYRCTVDNDRSKKSCRIGSVQARKLEEIVVDELKFLATKPQIIEGVVENATKEYREKVKVFTAKKKVLQDRLSLVDKKAKNLLEVLGEGHRKGVNAGYIAKELDKLEIQAGQLKKEIEAIEFEANELENKIISADVIRDNFLVYKDVYDHLTADEKYDLLHLLIKKIVYFEEDGADKDGKKTGKIKMDLWELPPINPSKLDSANNFAESVFWLPSADSNHGHGG

SEQ ID NO: 6665 - protein, 562 aa, unidentified
  source 1..562: note = uncultivated organism
MGKTVNKIYHAAIYVRLSKEDGDVASAAKAESNSISNQKNLIKDFLKDKDDIIVVSERVDDGYSGSNFERPGFQMMMDDIRRGTVDCVIVKDLSRFGREYIDSGKYIERLFPALGVRFIAVNDHIDSKEESSRDDIVVPFKNLMNDAYCRDISIKIRSHLEVKRRNGEYIGAFTPYGYKKDENDRSRLVPDLYAAGVVKDIFRMKLHGMSQTAIADCLNEQGILSPMEYKHSLGIRIQDNFKTHEQAEWSSMSVRRVLENEVYVGTLTQGKHSTPNHKIKKIMDKPEEEWIRIEGNHEPVISKREFAIVQRLLGMDTRTSPNEDEVYVLSGLAVCADCGAPMIKRNVPAGGKVYSYYICSKNAATKQCGTHRIPKDKLERLVFDVLKTHIASVLDAGRILAYINTVPFQELEIKELERQKEAKEQEIQRCRELRDMLYEDLKEGIVSKEDYAELYEGYNNKRKKAEDAVRKISRTIQDVVDAKTDKYEWLRYFKEYQNISELSRTAAVELIERVKVYDKNHIEIDFCFQDCFQSALSQIQSAGCTVSTEENGRVNIREREVV

SEQ ID NO: 6666 - protein, 545 aa, unidentified
  source 1..545: note = uncultivated organism
MENEGMKQLRVAAYARVSTDRDDQANSFESQVKYFNDWITRQEGWNLVNIYADEGITGTSTQKREQFNQMIQDALSGKIDVILTKEVSRFARNTLDSISYTRKLKEHGVVVVFMLDGIDTSQPDAELRLTIMAALAQEESRKTSERVKWGQRRRMEQGIVFGRDMLGYTVRNGRLELEPEGAETVRRIFHKYTIEGKGSYVIARELKEAGIKPMNPDGRIHYENGWSTTIILRILRNEKYVGDLCQKKTWTKNFLDHKKRYNRGNEDTVYIKNHHPEIAIISRELWDATQIELKRRALTKEQKSKYSNRHWCSGKIWCGVCGERFVSKRKPLKGGTTHMSWRCFNHTRAAAFRSAECGNDNYVNEKTLLSIMGYIMRFLVSNKEQLKQELLSEIEALGFEHTSAPAETAKSQITQIESRKSKLMDSLLDGLISKTEFTVKKSELDAKLNALKDHLDCVRSDIEIEQQETDKINRISEKIDEILDSDLNEDSRILNSITSKIVVYPDKRVQVYIVGIPCSFIVTYETSGRAETYKTVITGFDINRQ

SEQ ID NO: 6667 - protein, 713 aa, unidentified
  source 1..713: note = uncultivated organism
MPTAAIYCRQSFYKEDSCSIDMQIERSKAFCVSQGWDYIVYDTDKGYSGKDTDRPGFRQMIKDITAGKINFVVVYKLDRISRNLKDFFGLMEEFKAREVGFRSLTENFDTTTPMGRAMLAIIAVFAQLERETTAERVRDNMLDRARLGIWNGGPIPFGFQSSKSTTLVNGKEKSFTVLLPGEAEAEYVKQFYEWYLSPQSSILSNTKKANGLGIPTKSGKAWNPNQMNRILKNPLYCVADEAAWVYFSNLGVEMACEESDFDGIHGLMWYNRRKPHNKTTRLKEQSEWVLAVGGHIGVIPGEIYVKAQKKVVSTTFEPARKGTGSKGLLASLLKCGKCGKSMIYQSHSSGHWQYYKCRSKEQQGSCVCSGQTVKGLELDQAVINTIKQVCADKEFLEAIARKAIKNATDNTEPLHGEKHRLTDRIDVLVAEQKELIRALGKKTMPMDIIEERILEIEKEKSPLFKQIEEIDTKIDTQEWQKIDMEIVFGNLLRFNDVFDELEFEEKRTFLRSVIKEIVYTDGNIKMSIYFLPEITPGKPSTTNSNSDTSVMQGCPCGFYGSDIECKCTPLQIQKYLGRISGPLLDRMDLHVELPRVNFEQLRDREIGESSAAMREKVTKAREIQNKRFARSKISLNSQMRPADVKKFCRLDEESELLLKNVFDRLNMSARAHDRILKVARTIADLDGAENIRLQDLAEAIQYRSLDRKYWRNG

SEQ ID NO: 6668 - protein, 536 aa, unidentified
  source 1..536: note = uncultivated organism
MIRKKSRAAAYCRFSSSNQREESIDAQLRAIYKYMGEHDYTPVGDYIDMALTGTNTDRPNFQRMIEDAKKGLFDVVIVHKMDRFSRNVRDTLNIESELAQYGVKVISVIEQFSDTPEGQLQQIIQLGVGQYYSQNLAREVMKGLKENAYKCLHNGGLPPLGYDVDPKTKQYIINEKEAEAVRIIFKKFLEGWNYRKLADYLNILGYRTKIGNEFSATTSFYDILTNPKLKGLYQYNRSISKPKQPGMKRSHRKNKNESEIICVPNGMPAIIDEETFDEVQKLLSSRKRSRGAAKAREVYLVSGLITCGECGSPYHGSSRYGGRNKQKYVSYRCSKRKKIENPCKCKELKKEILDSFIINQPFTTILNSQHLEVLHQKVNEKLKQKFSEMDNDLPKLEKQLKEVNQKASNLVQAIAVGGLGSIETITAELQRLEQQKIMLTNEIQNHQVKQSAFNITLDQMKEVLEESKEYVLENNDEMMKMIISRFIHKIIVYSEAIEVEYNLGGFFYAFKKVILLETKTYSRNVICAYSPSKKVV

SEQ ID NO: 6669 - protein, 554 aa, unidentified
  source 1..554: note = uncultivated organism
MERRNRVRCAVYTRKSSEEGLSQSFNSLHAQREYCEAYIKSQGGEGWTVVRQRYEDGGFSGASMARPGLERLLADIDAKLIDAVVVYKVDRLTRSLADFARILERLDNQGVAFVSVTQAFNTNSSMGRLTLNVLLSFAQFERDVTRERIRDKIAASKAKGMWMGGVVPLGYDPPDDSGDRRLRVNEAEAVAVRSIFERLIQCRSFYDLQQQLMEDGVRSKSRRTPGGAVRAGVPFSRGALRHLLQNKTYLGLICHKGTTYEGRHEAIVDHATFDAVQALLSHRSAAWKRRAPDLERATLQGRLFDALGQGMKPVFARRKGRLYGYYVAPKLTLGLAGAGPADALTRVPCRPLDDLVRRRLIDLTGVASEMVSTSMLREVVTRVEVHSDAVQAVFRLSELRRLNASLKDVNELGAKLQLGDRVVAETSRVNHVRVSIPVRMKMRGGRTWLEDREATAGIKAKAVRLDAIKRLRAAHDAFKPSWPALARQLPRVRSAQTPLSDIGKFDWVFLAPGIQSAILGGRLDPTTISRLRQQASIPLSWAVQRRILESDGPT

SEQ ID NO: 6670 - protein, 580 aa, unidentified
  source 1..580: note = uncultivated organism
MADATGGKVRRSGVTRCAIYTRKSSEEGLEQAFNSLDAQREACEAYIKSQRHEGWTTLATMYDDGGISGGTMERPSLKRLLADIEAKKVDTVVVYKVDRLTRSLSDFAKIVDVFDAQGVSFVSITQQFNTTTSMGRLTLNMLLSFAQFEREVTGERIRDKIAASKKKGMWMGGNTPLGYDVHERKLIVNEAEAERVRHIFRRYAALGSVRLLSHELDRDGIVSKVRCRATGEPYGAKPLARGALYLMLQNRIYRGEIVHREASYPGEHAAIIDEELWNSVAKRLAANRNEHDSGAAAQSPSLLVHLLHDETGKPMTPTHAVKNDRRYRYYISRALVTASRSQVPGGRRIPAGDIETLVVDRLCTYLTNRGDMHDALHAHIPDAAEQEQLIERAAELGRTWSKRPGVEQRVMISLLLARIDVGADRIDIHLDRARLAALLRGDQRTRRYTRSGLGPATDAIVLSVPARLKRAGVGKRMVIEGAYAGAPDDTLIKLVVKAFALRDKLLTGDGISIDELSAREKLTGSYATRLLRLTFLAPDLVRDILDGRHPPTLTANTLMADTRLSLAWNEQRLRLAAGRP

SEQ ID NO: 6671 - protein, 535 aa, unidentified
  source 1..535: note = uncultivated organism
MQTAALMERTVTQIPAKPEALRRQAAHRQLNTGAYCRVSSKKEEQHLSYEAQCAFYTDYIQGNPEYRLAGIFADDGITGTSTKKRDGFNRMIKQCKAGKIDLIITKSISRFARNTVDTLNTVRMLKGMGIGIIFEKEGFDTRKATDEFLLTIFSGMAQAESESISANIKRGKEWSAAQGKVSFAYGSFLGYRKGPDGNPEIVPGEAAVVKQIYDRFLAGESFQQIALALQNQGIKTPKGCDVWSYTSIRSILRSEKYKGDALLQKTYIEDCISKRVRKNNGELPQYYIENSHSAIIERKTWDRVQEELARRAGKRKVKEIGTRTEQGKYSSKYALTELLICGGCGTPYRRVTWSRGGQKKIVWRCINRLDYGTKYCKKSPTIEEGAIQNAVARALTDLATMEPMVMENIRLHIELGLQSGTPDESAALRLRLNELNGALIEMVAADANANTSMLEEEVLSLQARLAGIDDVQHKNEQADEFLQDIFAMAERCKNRLIEWDEKTVRQMVDCVKVVDNERLLVIFRGGAIEREVRIG

SEQ ID NO: 6672 - protein, 564 aa, unidentified
  source 1..564: note = uncultivated organism
MVRSKSPVQRCAVYTRKSSEEGLEQDFNSLQAQREACEAFIKSQAGEGWRLVKTAYDDGGISGGTMDRPALQRLLSDIDEGRIDTVVVYKVDRLTRSLADFAKMVEIFDAHQVSFVSITQQFNTTTSMGRLTLNVLLSFAQFEREVTGERIRDKIAASKKKGMWMGGFCSLGYDIRDRRLVVNQEESKLVRHIYKRYLELGSVRLLKHDLDRRGIVSKIRISKSGARSGGSSFSRGALYALLANPIYMGEIRHKKVRHPGQHEAVVDRETWEKVQRRLRDQTARDGTPKIKAARNTLTGKLFDENGEPLYSTGAKGRHGGRYRYYVSRELVRRGGSSVGKDKSWRLAALELEQSVVVSARSILNDHAAIATTLQEAGVSSAEIQSVLKIADAKSALLESGPQAASMIAELVKRVDLRKNGMEILMNLESLLPLDSAVRRAAMLTFTRFVPLRMKRRGVAMRLVIGGGVSTRKTDPILLKAVARGHKWFNELVSGRARFTREIAAREGVNERFVRRLIPLAFLSPAIVQAIAEGRQPTDLTGEALSRGIEIPLEWTKQNAALGFE

SEQ ID NO: 6673 - protein, 536 aa, unidentified
  source 1..536: note = uncultivated organism
MKALRCAIYTRKSTEEGLEQGFNSLHAQREACEAYVLSQAGEGWQALPREYDDGGYSGGSMERPGLKQLMADIAKGEIDIVVVYKVDRLTRSLPDFAKMVEAFDARGVSFVSVTQAFNTTNSMGRLTLNVLLSFAQFEREVTAERIRDKIAASKAKGMWMGGPPPLGYDGVDHRLIPNADEAPTVRMIFERYLELRSVLELQAELKRQGVRSKLRTTKAGKVRGGAVISPGALRLILMNPVYKGALRHKEKLVEGAHEAIVPPETWEAVNAALTRRSQSLAEDRARGTSGLLCGILKDDRGHTMRPVHTKGKAGQRYRFYSSVALENGRKDEVGSVGRIAAGVIEAFVANGILPALDPAWRLDADPDQRLRSAVTRVTLGETQVRILTAKGSIPRDRMIQGAERQERADGETEWILPVRLKHRHNAVLIEAEGQSPTAANRIDRALVRAVAMARRWTADLRTGRHGSTAQLAKAENLCVRYLGQILPLAYMAPDLVEQIVAGRQPQALSLGALIARPFPMDWNEQRRLFMAIGAVG

SEQ ID NO: 6674 - protein, 541 aa, unidentified
  source 1..541: note = uncultivated organism
MLPKQTEYKVGMYLRLSRDDERQGESLSIENQRRILTNYVNENGWTLYDTYIDDGISGTTFDRPGVQRLLDDAKAGNINLILCKDMSRFGRNYIMVGQYVDYIFPSYGIRFIALTDNVDTLNSDSASMDMLPIMNVFNEWHAANTSKKLRTVFLSNAKAGKYMTAASSYGYIKGDDENYTPQIDPEPAAVVRRIFEMRASGMGHKSIADVLNSEKVVPPLDYRYEKLGKPVPIYSRHLWQAQTVKRLLTNPIYIGTLAQMKETTVSYKNHKVIRKDQSEWVIIENNHEPIVSRELWDKVQEYNASVSRGRCTTEHLVNPLSGLCYCDGCGAKMKMQKTPYNKSPYSYRCGMHVRYGKSYCSSHNIKGTILEGAILQDIQRQIHFVMNDEQAREKYLARKRGDVAVKSAEDGKRKREIEKRIDDLGKLIRKLYEDSVLGNMPEKTCNELIADYQKEKDSLQTELDGLLKRSETLKKDESDVDEYIRRLKSYAGADTLTRKMCLDLLEYVTVDEYVSKDAPRKIHIYYKLIDKPLNDKNNALA

SEQ ID NO: 6675 - protein, 555 aa, unidentified
  source 1..555: note = uncultivated organism
MKKEVRQVDARQIAHRRLRVDKKSIQPKPIQEERKEAEAGGVKTIPAMKREETRLRVCSYCRVSTLRETQTSSIDSQSKHYEDHIKSNPEWEYAGTYIETGVTGTKAEVRPELQRLLQDCRDHKIDLILTKSISRFARNTTDCLELVRYLTSLGIHIWFEKENIHTDSMDSDFLLSIFACLAEEESHSISGNVKWSIRKKFQNGSYKQALAPYGYEWRDKTLVVEKKEAEVVKTIYRMALSGSGYFAIATHLNTEKIPGPTGKAWSQNEVKMILSNPAYTGDILLQKTFVDETFQQKKNQGEMDQYLVDEHHDAIISKEDFESVRELLITKKEKYSISEDLFAGVEKKPYCFTGILICADCGSPMYRVENKDSICWVCKKHLDNAAKCPMKPQADTDLRSAFINCLNKLSWSGIVEKYQALLGKTEAERHAERLVEIEELLKVNQHEKKKLTAMIMREKFRPKHRERHAFLEKEAKELLKEKNRILIGGDAMSPLQMLKEFMSGWKVTDDIERFPEEKFQTLVKRCVVNTGESVTFEMNCGLKFTESLRTTTDSD

SEQ ID NO: 6676 - protein, 515 aa, unidentified
  source 1..515: note = uncultivated organism
MKNGNGKSGNGNEKTPNGVTPKIRCAIYTRKSTEEGLDQEFNSLDAQRESAESYIASQRHEGWEALSNRYDDGGFSGGTLDRPALRRLLQDIEDRHVDCVIVYKLDRLSRSLLDFTKIIEIFERLGVTFVSVTQQFNTTTSMGRLTLNILLSFAQFEREIIGERIRDKIAASKRKGKYMGGMPVLGYDVDRVVKKLIVNPKEAQLVRHIFKRFVQIGSATLLTQELNQHGKRTKEWVTKKGTTHVGVAWNKMHLYRMFNNRLYVGEIIHHDQHYPGEHEAIVPRALFDQVQAILEENCRIRGNKTRAQTPALLKGVIKCGHCGGAMGPTFTKKKGKTYRYYLCIAASKNGYDTCPVKTVAAGEIEGAVMAQLRAVFRSPELIAETFRTAQQKEADEIGRLKQERFDLAGSLPSTDDPLRRREIEKRLPEIDGMVAALEANPLTEQNVADALGNIDTVWDELFPAEQARIVSLLIERVVVNENDMEVIMRTDGFRSLVSELDDAPAPSEERSSAHG

SEQ ID NO: 6677 - protein, 548 aa, unidentified
  source 1..548: note = uncultivated organism
MTNINKKGSVFYARTSTEEQADKRTIESQIEANKKSIRENGETLVDEYVDDGYSGSTLDRPQLERLRNALRERTFDKIYIYSPDRLSRELHNQLFVMKEFRKYGVEIIFISQKFDDNPYGNLLFQMVGSIAEFERAQILDRTRRGKLHKVKNGILLGSIPPFGYHYIKKSETAAGKYEINKEEAETVRLIFKIFNSPSIEGIRTLSKELLRLGVRTRGGSTKWANSSLSRIIKNSTYIGTTFWNKYAALEPLKESSIIKYKRLKNSSRRLRSKEEWIPIRGVPVIISEKEFVMAQEKLRRNAALSIRNTKYSYLLTGLSYCGCGKRFYGYPCHGKPRYKCSDKYLKYPLPKTCQQGTIDTNILDEGVWSAFLKTLESPEVVTSRINGLLTNEKDKKEEVEIQIQAIDKNLALLATQEQRLIEAYTEQVFSLEQLKNQRDVLENKRKVLIEKRKQLEADLIKQTPALSNQEVEDYFNRIKQRATSANFELRKQIIKLFVDKVAVQGSNVNIKAFLPPKASLLSSQSQEIMSSCCCDCECSFCMLLAFNF

SEQ ID NO: 6678 - protein, 560 aa, unidentified
  source 1..560: note = uncultivated organism
MKRVRILLRVSSNQQLEADGDLSVQRQLVKEYVESHSDWVLDSKEYFEGSNSGYKNAVTDRDILQEVYRDAEAKEFEILVVYKDDRLGRRMWEIGTYVMSLKSIGVDIYTVKDGCISPNSDDIMGQMVLALRYGNAQKSSSDTGQRVKDTAEKLVQKGKFMGGSAPFGYTLEYSNEISKHGRALKHLVIVPEQAEVVKHIYHLSLDKEYGSTKIAKTLNEDEKYKTLAPNDVWKSGTITSILTNPIYAGHTAYKRRERTNGKYRRLDSSEWVLSVAANDSITIIDSDTWNKVQEKRKKRGDKYIKKLENKDVTVIRRNDGMLALVDVLHCGYCGCKMVNGSKYSYWTIKETGERRTRQIPIYKCQNAWQGVPHDKTKQHRADKIEPIVFDALAKYIARLQRNENVFEQIQTNQNTEKKTLEKIIAKEKQELAKIQQNIDVLESNIPNAMQEKYPLSLEELAAIIHKHKEQFKAQQEVIRQKEANLNNVSVNVSEWQELRQQLPSWQEVFMNADTATKRVLVNKLIERIDITKDDIIIRFKININDFFPQPRISDGFGVSK

SEQ ID NO: 6679 - protein, 578 aa, unidentified
  source 1..578: note = uncultivated organism
MPAERRRRSSSSPAPRGTGRRCAIYTRKSTEEGLEQAFNSLDAQREACEAYVASQRHEGWILLTSRYDDGGLSGGSLERPALQRLLADIQAGWVDLVLVYKVDRLTRSLADFAKIVEAFDAAGASFVSVTQQFNTATSMGRLTLNMLLSFAQFEREVAGERIRDKIAASKRKGMWMGGSVPLGYVVRNRKLVIDEAEAERVRTVFRTYHELGSVRLVGARLASEGVASKSGRRLVHGALFHMLQNRVYRGEVRHMANVYPGEHQAIIDRPLWDAVQTQLAENRVQRASGSNADHPSLLAGLAYDGHGPTRLTPTHAVKAGKRYRYYVSQTLITATRASSPGGRRVPAHDLEQLVIGRLRRFLADAAALHAGLQSIVPDAAGRRRLLDRASRLARDWPKLSATEMRQLLLGLLSRVSLHADRVELHVRPDRLPQLLTDGPEAVSPETTHGMAGAPSLVLSVQASLRRAGKEIAMVLGAEPAAAPIADPAMMRLILRARAMWEKVQRREVEGLGELAAQDGVSGSYATRLIRLAFLAPDILGAIMDGRQPAELSAAALVQECRRGLPLEWQKQRDALGFR

SEQ ID NO: 6680 - protein, 542 aa, unidentified
  source 1..542: note = uncultivated organism
MLKSVYRTGIYTRLSRDDGDKAESNSIVSQKSMCEEYIAQHTELELCDTFTDDGYSGVSFDRPDFKRMEQAIRDGKIDCIVCKDLSRFTRNYIEGGRYLEKIFPQLGVRFIAINDSYDTATGNPQSDSFIIPFKNLINDTYCKDISVKIRTNLDVKRRKGEYVGAFTPYGYMKSPQDKSRLVVDEYAGEIVRSIYTMYKDGMSIGRIADRLNSMGVLSPMEYKLSQGSKYESLFKSHEVARWSYMAVRRILTAETYIGVLVQGKRGTPNYKVRKLQDKDESEWIKVEDAHEPLVSYSDFMAVKEMLGRDRRSNNDMEALNLFSGFLYCGDCGQSMVRKTVPSKAKKYIYYVCAASKRGECNPHSISERELERVVFHALHDQIELVLKLDETLDYISRLPTADRRAFNYEAQITKIEEEIERCQSLKLRLYEDLSDGIIDKAEYMEFRDTYTKTIAQKKDTLIRVQREYRDTLATGITERNWVTLFRQYENIEDLNRRVLMALVDKIIIHENHVVEICYKYRDEYEQALAYAENYKDDFKAVV

SEQ ID NO: 6681 - protein, 562 aa, unidentified
  source 1..562: note = uncultivated organism
MADLQRARSAGAAKRRGDKGAVTTSSTRQLRCAVYTRKSSEEGLDQDFNSLQAQREACEAYIASQRHEGWRLVATAYDDGGYSGGSMERPGLVRLLADVQSRRIDVVVVYKVDRLTRALADFAKIVEIFDCVGVSFVSVTQSFNTTTSMGRLTLNVLLSFAQFEREVTAERIRDKIAASKRKGMWMGGPVPLGYRVENRKLIVDEHEAETVRMIFTLYLEMRSTIATARALKQRDVLTRKRIRADGTSIGGIPFTRGPLQALLRNRVYIGELIHKGQHHPGEHQPILLRETFEVVQQLLTEQCVARSAYRHRKAALLTGRIFDSNGNRMTPSHVSKHGVRYCYYVSRALLDGEKDRAGHPARIPAAEVENLVISALRAEAEKHHHPVPNSDMTLVEIMLASVQVHADYIILTLARAEDASDDLARSGNECATTITLPCVLGMRHAERRLVPTVQAADDDQRQRNGPQAGNRRRLLDAIYRARGWLDELQRGTVESTLAIAEREGRSDRNVRMFLNLAFLAPDLIEAVIDGAFPSSLSASQLAQALPLDWTEQRRMILSASAT

SEQ ID NO: 6682 - protein, 570 aa, unidentified
  source 1..570: note = uncultivated organism
MSTDTKLTRVALYCRVSSDEQAEHGVSLDDQRERLEAWAKARDYKIARTYIEEGEFGWNDDRPQLRNLLLDARAGRFTLLAVTKIDRFFRNERLLKNYIYELENLNVNFVSLSEGVDTREAGTGKLVLTLFGQFAEMEHDRISERVTDFRRHLANKGQWSSGRPPFGYRFNKEKKQLEICDLEAEGIRFIFAQYTQPEAIGIIRLAELLNKSKYMPPRMFRDNPKNRCWTQTNIRHVLTHPAYKGGPNEKWKFNTPAIISPEIWQQTKNRLANNQHFKPSKNNPALFRGKLRCDICGRGLSLGYNHSSTLVYECPGRHKATHMDGSARCTLPRLDVTTTDKKVMRKIDSIISDPGRLSKHIKRTIDALEFTKNQVFNELKPLEMEVAVIKEDMAIVNARLEKRQIDIASYKERIDKLELKLADVERRIKEADPLRLYVANAKQEEENRWREATISSYRKIYSLLLDGKSPFKWLTDEELEQQGPLEIHGLLADVYKAPFKLKPISGISKSAQPATIAPLGTVLSNELRNFKATMVGIVKSDGSIEIQGNILSRDLNISPAYMSARSRQSR

SEQ ID NO: 6683 - protein, 537 aa, unidentified
  source 1..537: note = uncultivated organism
MKRKVAIYARVLTEHEAQLSALDNQVQYYDSILKQHPDWILYDRYIDEGITGTSTKKRKNFMRMLEDAKEGKFDLIVTREVSRFARNTVDTLQETRRLKKIGVEVYFTEDNIWTFNDEDGELKLTIMATLAQNESKKTSQRVKAGQMISFQNGVFYGTGNILGYDKVGKDLVVNEEQAEIVRFIYSEYLNGKGTVSIADELTRKEVKTSTGLTNWSPSYISRVLRNPFYSGTIVYRKSYIPDYLEQKPKMNYGEVEQVIVEGKHELLVSKEDFKKVQEIMDGHSKQIKLGIRRAKGTAKNIWSKKLICECGSNFNRRVYHRNKTNTTFSYVCYNRKMHPDSKYKNTDYKLCEVKEVQEWKLQFMAEAIFTKLTQDTDNRKELVNKLMNGVKIDDYPEKKIKQRIDKLNQLTKKETAKLDKLIDTYLDETINITMYDIFQKKLSSRIEKYKIEISELEKEYKSIVPLEVRIEKVKNSIRKLLDISYNGVDEKIIEEFVDKIIVHKDYFEWKLNFMNETIKLEIDGKSKSDCLILEYND

SEQ ID NO: 6684 - protein, 557 aa, unidentified
  source 1..557: note = uncultivated organism
MEKEIKRVAIYCRVSTIEQAEEGYSINEQEKLLIEYCEKQGYEVAEVYSDAGISGKDIEHRPAMKKLLADATKRQFDLVITWKINRLSRKLADALKIVDILEKYNITYRSYSEFFESDTPAGRMQFQMMALVGELERGTISQNVKMGMCAKAKAGEWCGGIAPLGYKWVVMENYGNSSRKKSRLEIDEKEAEVVRLIFKLYASGKGYKAIANQLNNIGYKTKRGNYFSVGPLRDILMNPVYIGKVRFNVRRDWNEKRRSNKNPHPIIADGIHEAIISQELWDKVQLMIEQKAGKPSRIYDGEYPLTGILKCPVCGAGMVISRTTNTLKNGSKKQLTYYACGAWKNKGTAVCRSNSIRVEKANKAVYGQLEKLFSNEKILKSVLKRVNEENLKRIESAQKRLNICESELKECEQKKNKIFEAYENGIFTDNEFIERKKVINDEINVLIMQKGKAQLILNQEETKEIPYETVKEVLQNFGKLLSSDKLDREVKKRLLHMVISEITLDKRREIDSIKIHLTNEIMQFLDINEGETPNKGVSPNLLFKNYKINTFDLQLVI

SEQ ID NO: 6685 - protein, 572 aa, unidentified
  source 1..572: note = uncultivated organism
MNPTLKSVLRCAVYTRKSCEEGLEQSFNSLDAQREACEAFVLSQRHEGWRVLPARYDDGGFSGGNLERPALKQLLEDVAANKIDTIVVYKVDRLTRSLADFAKIVEALDARGVSFVSVTQQFNTTTSMGRLTLNILLSFAQFEREVTGERIRDKIAASKRRGMWMGGNVPLGYDVKERKLIVNPEEAKTVRRIFRLYLEAGCVRGLKVRLDEEGIRSKVRRGTSGGRSGGSSFSRGALYKILNNHIYLGEISHKGQCYPGEHESIVLRELWDQVQTQLRGDNQGRRHGVRVESPSLLTGLIMDGEGNKLTASHTVKSGRRYRYYCQAVSQQSRVQGSSIRIPAHDIESGVVGRIAEFLQSQKEVVDQLGAVEETAESIQRLLGSAECTSRLLMAGTRGQISDLVRKVVNRIVVHQEHIQILLKKKYLRAFLLNEQPVDHVGDHIISLEFAARLSRRGREVRLVLSSGAAEAVSANQSQALLKAVARAHEWYEQLVTGEASGPRSIAMRTGLDESYVRRILGYAFLAPDIVEAILDGRQPPDLTLEKLRITLPMNWVEQRRVLLQTAVNVRAN

SEQ ID NO: 6686 - protein, 555 aa, unidentified
  source 1..555: note = uncultivated organism
MKPVPSRSERVVRCAIYTRKSSDEGLEQSFNSLDAQREACAAYILSQASEGWSEVATRYDDGGLSGGTLERPALQQLLGDVAAGRIDIIVVYKVDRLTRSLLDFAKLVEAFDKAQVSFVSITQSFNTTTSMGRLTLNMLLSFAQFEREVTAERIRDKIAASKAKGMWMGGVPPIGYAPAERTLVIVESEAALVRDIYRRYLVTGSVHQLQSDLEREGIAVPSRTLKSGKRIGGGAFSRGQLYHILKNATYVGRIVHRDTSYEGLHPALLDRSLWDAVQQRLADNVQGTRQRIRVSQPSLLAGRIVDEDGQALIASHACKGTQRYRYYIGTGGNPPDKRTIRIPALQIEQMVVDRLTALLADPIDTLAHHLDIAAGDYPAFLARAVALGGRITQRHYATIRDLVTQVRLAQGQVMLSIDTAALAGALRAAIADPSPLELVCEVRLTRSGRPVRLIRGGENKAGKPDPTIVQLLVRANRYWQILKAEPIDITRLAEREGVNPSYLTRILRLAFLAPDITQAMLMGARTLTATARQLTLSEAITADWAAQRRLMVSGT

SEQ ID NO: 6687 - protein, 582 aa, unidentified
  source 1..582: note = uncultivated organism
MKAAIYSRKSKFTGKGESVENQIQLCKEHGMKYLGLSEDDFTIYEDEGFSGGNTNRPQFQKLIKDAKSKKFDILICYRLDRISRNVSDFSQLIKDLNKYNVNFISIREQFDTTTPMGRAMMYIASVFSQLERETIAERIKDNMMQLAKTGRWLGGVTPTGYKSEAVTSIAPSGKERKIFKLTPIPEEINLVKLIYEKYVSLKSITKVEKYLIENNINTKNGLDFHRYSIRFILSNPVYAIADKVLYDYLIENGYDVCSGSEEFNGINGLTAYNKTRQDKENYSDRYRDNSEWIIAVGMHSGIITSTVWIEAQKLLEQNKSKAYRKVKNSQSLLSGILRCSQCGSYMRPKSINRRNEDGEQVFYYMCEMKEKSRKSRCDNANINGNTLDASVIKELKKIAAKNSPVFDEIFCKKALVGTTKDALQLEIDTLKTKMTELDMSIQNLVAAMAKGQKDEVLTIIFNNMEELTKEKESVKKRLSELQDIEKVADFNGMNLDLVAQSLGTLNDSAWDVMDVDAKRRMIKSVVDKIMWDGKKVDIMLFGSKCIKMPGMELPALPEALNAEELFPQCEDSKCKQNAIFVR

SEQ ID NO: 6688 - protein, 506 aa, unidentified
  source 1..506: note = uncultivated organism
MAIALYARKSVERENSISCDTQIEYCRSMIKPDERSEKVLSFIDNGFSGGNTDRDGFQKMMRQIERGKISKVIIYRIDRISRSLADFVGILETFKAHGVQLVSSQESFDTSSPYGEMIVKLLVVFAEFERKSTIERVTQAYQHRSDLGIYMGGRKPYGFTLADTTVHGIKTKMLTPVEHEAEQLRYIFDSYAAGGVSLRRLMDNLVHNHVLPSEGSWSTAKLSAILKNPIYVRADNAIYEYYAKRNTRIVSDIAEFDGVHGLQLYGKTTHTAEDWSDMKVVVMSHEGIISSDVWLKCQRKLGQNKQIGNSMSNTTSWLGGRLVCAQCGRTMTVTKGSAHADGTRTRYFSCTGKSHNRACKGSRVTLYADSLEDMVYELISEKVATLKDSRRQVSVEHTGQLNLLKNRLSEIKVAQGKLVDLMMDERCEADMLRLLNERAKKLADESREVSGRIEELESASTEIVRGVGLSKCWVKANYEERRTVCQLLIREIRMDADGNAEVVWNI

SEQ ID NO: 6689 - protein, 640 aa, unidentified
  source 1..640: note = uncultivated organism
MPRKDETKSKKAPLKTKRAGIYCRVSTRGQGESGISLQNQERRCRKYCESQDYVVVDTFIDVASAKDLKRPEMQKLRNAARSNKIDVIIALKLDRISRVPRDFYNLIEELNALDKGVVVVDDQWDTTTPVGRMLVGILIQFAAFEREIGAERTKAAARQRALSGLPGGGVAPLGYDRVEKEFHINEQEATIVRRIFNEYLCGIGPLRVAQGLNEDGFRTKKHYNEDGSFRNGGKNFNEKHIHTYITNCIYCGKIHFNGEMFPAIHEPIVTIETWEDAQKIVRANRDKKNLGSSIRDQHVLAGLITCGICGDIISATGGTGKTGKVYHYYQCLSSRSPGKRKTCNCRPIRTEHLEMAVVAMIKELANTKDFLASIEKEFISTLAEEGLDELKQDLQTTSNSIIDLESKIKNLIEILAKGTLDDSTPIEQELDSLNKLKRERSSYRDQIKQELLLKESPTPNTDALLSLYQEFSELWDNFTRAEQRNVLNLLIDGIEINYPKGSDKGEIILYLYHEPPVKSLHEITEGSHLFSVLLRKVDKHVNSSVLHISLTKVYNNHTVNPEVVLHLNPTIFHVFLPKTRFGLQRCELYPRRLTKVERERGRSAEYERLMQENGWSRAELARQLGVSRAWVTTVLRGSDN

SEQ ID NO: 6690 - protein, 554 aa, unidentified
  source 1..554: note = uncultivated organism
MRKLDAMTRSQRCAIYTRKSTEDGLEQEFNSLDAQREACAAYVLSQRHEGWTLLPDLYDDGGFSGGSMERPGLKRLLADIEAGRVDTIIVYKVDRLTRSLADFAKIVDVLDAAGASFVSITQSFNTTTSMGRLTLNVLLSFAQFEREVTGERIRDKIAASKKKGLWMGGPVPLGYDVCERKLVVNETEAETVRYIYRRYLELGSVKELIAVLDREGARTKVQVRTSTGHRGGIAFGRGCLFHLLKNRIYLGEIVHKGTAYPGEHEAVVPLELWTNVQERLAERARVRVLGNGADHPSLLAGIIRDGERRSMSPSHTNKGPRRYRYYVTHESHVSQQQPAWRVAAHDLEAIIVNRLVEHLGDPAASISTTDQHRGDADRRVEQVSRVRDLLATGTASEKRQVLLDHVSMVTLHEDRIAITLADSNPHVDLNANHPTTLIVAAVRIRRGHDIRLVIAGPAPAVPKRDDRVVQLVADAISTRERLQAMGDVSIAKAAAWLGCCRSTLTDRIKLSYLAPDIVEAILAGSQPRSLTRRRLASIDLPIDWRQQRQMLGFS

SEQ ID NO: 6691 - protein, 552 aa, unidentified
  source 1..552: note = uncultivated organism
MVSKKTKTDKSVKKIAAIYCRVSVINYAVEESSVETQEKILKEYCDRKGWAIYNVFVDEGESGGKWNRPNFKKLLEHAKQKDFDILLAHKIDRISRSTKDWYKLIEKLEEYDIDIVTISPEIDTTGPFGALQRNILISFAEFERSMARERTLERMHTKAQKGEWIGGRPPIGYKLENKKLILVDDHAQIIKKIYQLYSLGIGPSEIAQKLNDKGIRKPIRTTKNGKKSGGGKFTRNFIYKSLRNSVYAGYLNFQGRRFQGNHTPIIAPKEWEKIQNKFNRNNNKPSPRLGTGQTLLLTGILKCGFCNSHMTTSGGTKKKMKDGSIKQYYYYKCTNQIHKNVGVCKNRQVTADALDNTIIEFCTKLVNDPEFIKRTEQRMKLHNDDRIEDTEQEIKKLSGEISDLSKKIDNLTNVIADNPDQNIKSLVKKIDDFENSRDQLHKRKQKLTHYLDTISEDKIELPDIFQRFAKFGEIFDSLSRDQQRRVINTIVKEISIKIPKNSKNGTIKIKPWNHPSQGFEYDVNKGLNFVTNRSGGGTRTPNLVVNSHPLCH

SEQ ID NO: 6692 - protein, 563 aa, unidentified
  source 1..563: note = uncultivated organism
MSAFFMPPAIKPGGKVWSVDIYVRASREDEDKSKEQSETITNQIILLTDFVNSRPDMRLHEVRKDDGISGVTFDRPGFNALMDDVRSGAADCVVVKDLSRLGRDYIETGKLIEEIFPFMGVRFVAVNDNYDSMGDRSASDDIVLPFKNLVNDSYARDISIKVRSSKATKRKNGDFVGPFAAYGYRKDQENKNQLVIDEDAAEIVRLIFSWKLDGMSAQGISDRLNDEGVLSPMEYKLSIGLNFKTQFKAHKTAKWSAVAVFRILKNELYIGTLIQGKVTTPNYKVKARVERPPEQWNRVEHAHDPIISPVVFARVQYLLSLDTRAAPNRDNVYLFSGLLSCSDCGQTMVRHPIKTGGKEYVYYVCATAKYESKCGNHNIREDSLTEAVLAAVQARIRLVVDIEGMLHYLDGLPLQQAETAKLQAQFAKKQEEIERYKRLKLSLLERLEDGILSKKEFVEFKAVYTSRCEDAERAVAGLQAQIDGIVAGTSGKFKWIEHFKEYENLTELTRKVVVSLIQKIEVYQGRRIRIQFYHESEFVLLQEWIAQATAPQATEEADQRRVG

SEQ ID NO: 6693 - protein, 569 aa, unidentified
  source 1..569: note = uncultivated organism
MTRRTIRCAIYTRKSSEDGLEQEFNSLHAQREACAAYVASQKGEGWTLLPGHYDDGGISGGTLERPALQRLLVDIDEGRADQVVVYKVDRLTRSLADFAKLVERLDRAGASFVSVTQSFNTATSMGRLTLNVLLSFAQFEREVTAERIRDKIAASKKKGLWMGGNVPLGYAADGRTLKINEEEAETIRLIYDLYLQRGPVRAVKQQLDQRGLKTPVRTATTGRRSGGVPFGISHLHYILSNPVYAGKTRHKDKVYDGQHEAIIDEETWTRVQQMLEVKAWNGSIRKRRAKHPSPLIGKLFDETGDRLTPSHANNRGVRYRYYISHRLTKQPRKLANDGWRLPAPELEKTISSAVADHLQTTTFAGLVEQPSAAEFAEITERLEQLSSGNAGDIAAQQLLQLVARADIKAGQMVIRLSPEALASAINIKQERIRTDALLFSVPFRIRRKGVEARFDTGKETPEVDMALLRNVAKAHRWLEMLKQGQSFAEIAEQEKLSARRVQQLMDHAFLAPDITRSIIAGKQSHGLTTEYVQRSEIPENWAEQRKLLAAISTDVGLTNFPKSKLLALK

SEQ ID NO: 6694 - protein, 503 aa, unidentified
  source 1..503: note = uncultivated organism
MSSIRFSRNMYPYDALYARQSLDKRDSLSIESQLDFCKYETHGNAFETYIDRGFSGKNTSRPAFEDMMKDIRTGKIKRVIVYKLDRISRSILDFSNMMEVFQKYHVEFVSATEKFDTSTPIGRAMLNICIVFAQLERETIQKRVADAYYTKSRRGYYMGGRIPYGFQLEKKIADSGYASCFIPFPEEVEQIQWIYKLYAAPDMTLGAILRKLSAKGMIQKRGATWCTARLSEIIRNPVYVKADVDVYNFFLSQGAYIVNPVQDFIGMNGLFLYKRQSDENCDVVIAPHKGVIDSELWLKCRRKLMNNRQAARTNKGKRTWLTGKMKCKKCGYAYIVTTANTKAGRYFQCSGSRYAVKCKGAGQTIYAEILEEGVLCEMKKKLGEFQFLSERQMQDTPSLPMYQMQIAKIDKEINSLMGKVGDANHILMQYINRKMEELDNEKQKMNEAVMGVTGSYKNKNTEKITNHLQLWEKLCPEDKQQIADILIKVIHIGEGEIEIEWNI

SEQ ID NO: 6695 - protein, 537 aa, unidentified
  source 1..537: note = uncultivated organism
MYAAVYARVSSEEQAERGTIENQIEFATKYCDLHQIKIVDFYKDDGITGIIPLEERPEGKRLLEDAKNKKFDLVLVYRLDRLGRSARIILNAVYEMEQYGVKIKSMTEPFDTSDPNGRFLLTILAGVADLERETILERMRLGANRAARAGKWIGGIVPYGYRVNEEGYLEINENLLPGLNMSEADVVRTIYYLIAEAGYSTIKVADYLNALGVPTSYVKDGRQVTRGKRKVNTSGLWTPGRIRNMIVNTTYKGIHYYGKRSKKNRELIMREVPAIVSEEIWEKAQQKLKENQLEATKNAKRKYLLRGLIKCGLCGLTYQGQSYKSSRNQSKAYYVCGGKTAYRGPLKGKCPSKNIPAEWIEDIVWNECVAFIENPGETIKELAKTMETKKTQREDLEREKQRILNSLKDKELERQNILDLYRKKIITVDDVEKQFQKLNEEMATLENRIKEIEKQIITEENLLTGFNTAEELLANLRTKLKEDTPFEIRREIVRTLVKEIIVDTKFDEKNRPSAIIKVKYNFSDVTRTIKDSSRGSI

SEQ ID NO: 6696 - protein, 560 aa, unidentified
  source 1..560: note = uncultivated organism
MAQSDGAPKRCAIYTRKSSEEGLEQNFNSLHAQRQACEAFIKSQAGEGWRLTKTAYDDGGFSGATMDRPALKALLDHVKEKRIDVIVVYKVDRLTRSLADFAKIVEIFDAEGVSFVAVTQQFNTTTSMGRLTLNVLLSFAQFEREVTGERIRDKIAASKQKGMWMGGTVPLGYDLTDRRLVVNAAEAETVRLIFQLYLELKTLRRVRVELDRKSIVSKQWESRGGGRHGGFRFRRGALYYLLANPIYVGEIRHKKAIYPGQHEPIVERSIWQRVQEMLNAKAAHPRGGTVSRTTGLLMGRLFDENGEPLYSCWAKKGDLRYRYFVSRKLVKGSQMPDVGGWRLPAGRTEEAVTSAALQMLSDRVALASTLKTLGLYASELKQAVEAIDSKVRSFRQIETMEESETIIERVDLKRDGMQITLNLGSMLRPDQFPHGGATLRMTRLVPMHLRRRGVETRLVIPGEAVTASRTDPALLRALARGHRWFGELASGRAASTKQIADREGLSDSYVRHMVPLGLLAPTIVESICAGRQSVSLSAERLKDHANLPIEWDAQHQLLSD

SEQ ID NO: 6697 - protein, 530 aa, unidentified
  source 1..530: note = uncultivated organism
MRRRPTEQPRAAVRLMRCAIYTRKSTEEGLEQEFNSLDAQREAGEAYVRSLQHEGWSCLPDRYDDGGFTGGNMERPALKRLMADIEAGKVDCVVVYKVDRLSRSLLDFARIMETFDRHQVSFVSVTQQFNTTHSMGRLILHVLLSFAQFEREIISERTRDKIAATRRKGKWAGGHPILGYDIDVNGYKLVVNAEEAERVRAIFQLYLEHESLLPVVVELEQRGWRNKRWQTRKAGERGGKAFDRTTLYRLLTNVAYLGKVRYKDEVHDGEHAAVVDPGVFQKVQAILERNGRTGGGPVRNKFGALLKGLIRCVPCGAAMTPIHTTRQKTRRYRYYVCSSAQKKGWHTCPSKSVPAGQIEQFVVEQIKAIGRDEAMLREVLTEARRQDEARAAELEGEQRALERDLAAWHTEIRRMTLQIKPGEHNGPLIGRLADLQERVGLVETRVRKVREQVHAIHHQLLDADETARAMSVFDPVWGTLTPREQARVIHLLVQQIDYDGGKSKVAVTFRPAGIKTLAEELDGGRKEKRA

SEQ ID NO: 6698 - protein, 549 aa, unidentified
  source 1..549: note = uncultivated organism
MTNNKTYRAAVYLRLSREDGDVADGGKQVSNSIANQKELVMDYLKSHPEITVVSTYTDDGFSGVNFERPEFQRMLSDIREDKIDCVIVKDLSRFGRNYIESGRYIEKIFPMLGIRFIAITDGYDSINEDMGTDMIIPFKNLINDAYCRDISIKIRSHMDIKRRNGEYIGAFAAYGYLKDEENRNHLVVDEYAADVVRDIFTMKICGMSQQSIADKLNTDGILAPLQYKKSVGVSLESSFRKSVKPKWSYNAVLRILKNEVYTGTVVQGKCTTPNYKIKKRIHRDESEWIRVEDMHEAIISKSEFNLVQELLLRDTRVAPEKSEVFPLAGMVYCADCGEPMVRKTVPAGNKKYVYYVCSGNKRDKGTCSSHCFPEKKLIRSVTETVRTHIGKIIALSEAVEIISKTESAKPDIVKYEDRISKLREEVESCNSRKKNLYEDFKDEILSKEEYSMLRDRYQKQLDEAESCIASLEAERDMILANGSGKQEWIEKLKTYKGIKELDRSLITFLIERIDVIDGNTIQVTYRFREEAEELKRLAELYSIDMKEAV

SEQ ID NO: 6699 - protein, 513 aa, unidentified
  source 1..513: note = uncultivated organism
MINDKKKVRYAIYIRKSHEEGLDQDFSSLDAQRSAAEAFIQSQVHEGWKLVPARYDDGGFSGGNMDRPALNSLIEDIKARKIDCVVVYKVDRLSRSLLDFSRLISLFDEYQVSFVSVTQQFNTTTSMGRLTLNILLSFAQFEREIIGERIRDKKLLTARQGKYIGGQPKLGFDIVDRRYVVNEVEAKLVRRIFKLATQQQSCLKIAETLNAEGFRSKVFTTKTGKTMGGKHYTSRLINNILTDAKYIGKIVHKGQAYDAEHPAILPQEQFEQVRKVLRSNRVYTHRHQAKRIAMLRRLVHCSHCGSVVMPAWTNNHGREYRYYTCAKKVKTGYSKCALPSLPAGELEKTVIDQLRNLIRHPDVIAHTYREVCAGSQTGPDPEVLAQLEELRQSRQQMHLAARSLLDLKDPDGPLVKSELKRLNDQMKSLDDSIRNLEAATTSASPVDLAEITNALSRLDPIWEVLYPEEQSRILELLIESVTVSENNVDIRFRTNGIEKIVEELTSQKERSDG

SEQ ID NO: 6700 - protein, 703 aa, unidentified
  source 1..703: note = uncultivated organism
MFDFEAPKKAAVYCRVSSEVQQERQTIESQVEFAQKYCELNSIAITKIYRDDGITGTLPMQDRPAGAELLADAKDGQFQLVLIFKLDRLGRSTRVILNAVHDLDAMDIKVRSMTEPFDTSNASGRFLLTILAGVADLERSNILQRMDLGATRAAKEGKWLGGIVPYGYFKNDAGYLEPNETTIPGTDMSEVDVVRTMYHMCADEGASTLKISDHLNALGIPPAWVAHNLGGKRRNNTSGMWGPSRILRILKATTYKGIHEYGKRSQRGRETISRQVPAIIDAETWEKAQAMLKRNKIDAMKNAKHQYLLKSIIKCELCGATYRGNPAGKTCKEGYYSCGGRANYRRMNREKCQGMSINMKWLDDFVWNDCLRFINNPGLVIDSIEAAAADIDVDGKTEKLLRGRIAELDADHERMLDLYRQKIINLDDLTGQLDKIKKDRAAVEEELLALTAKKSASEIFNSKETAIDMLELLQKNLNRAEITFELKQAVIRTMVDKITILTDTSGATPRARVTIHYKFYDDTPTDFTRTVDRRGKRADNCAGIVTTIADYPPAPSPGKTQQERIIYLQFRENLSQAEMARAGNTSLATISNIVNGHSESLCMGTIRAMSDYFGLPYHFIGAYDVLPGNTIPEQLKKGRLYRLMSLDEAAAFFGVSRKTYHKWEHGRIGSSDKAKRPDQDKLAEWAAVFRQNKLGRRLVPVHR

SEQ ID NO: 6701 - protein, 539 aa, unidentified
  source 1..539: note = uncultivated organism
MHVALYARVSTTRQAEKDLSIPDQLNQMREWCKANGHLIVQEYIEAGASATDDKRPEFQQMLSDALASPPPYQAIIVHSRSRFFRDLLEFLMYEKKLKRAECRVISITQQTSDDPAGEMASKMFSLFDEYSSKENGKHTLRAMKENARRGFFNGSRPCFGYRAVECFMEGDNTRKKKRAEIDPSESSTVRHIFDYYLNGHQGKVMGAKDIALHLNATGISLRGNVWNKSRVHEVLSNRAYIGEYYFNKRDHKTKTLKDESEWILLNVEPIIDSAIFESTRAKCESRSPAKISPRLVTSLILLTGLLKCGCCGAGLTTATGKGGLYRYYKCNTRINQGAKQCSTPAIPMDKLDGIVMDAMLEKILVPDRLKLMLTELRKLQKTKANDQEELQKPLNRELAEIQAGTTRLYEAVEKGLLPQDEFLQQRAQKLKARREEIMLELAGLKRRQAMPLDMLTPKQVDQFAKVMRSIMTERRNTTGKAYLRLLINEIRIEENQATITGKNSALAFAMLENTKVDTVVPTFVPNWLPDLDSNQGPAD

SEQ ID NO: 6702 - protein, 517 aa, unidentified
  source 1..517: note = uncultivated organism
MKKERTDSLEYIAKKHKQEQEEYLKAGVVKRVALYARQSVDKKDSISIDTQLDACRRLLKENEPYKEYTDKGYSGKDTNRPAFQQMLRDLHAGKISKIIVYKIDRCSRSVLDFYQLVHTLDTLGCGFVSVKEEHIDTTVPTGKLMIGISAVFAEFERETIQLRITDNYYSRIERDGRWPGGPAPYGYRVKPHSKPSMLEYEQTEIEAVKIIYDKYYNDSSISLVRIVRDLEALGFKGRKGKNFRTTAILNVLRNPIYVKADSTLYYYFQSLGVTMVNPIEEWTGEQSAHLICNQQGKKYTANNYENCIAYLTNIKGFVDSSHYIKIQERLKTNKQMARGNKPSKMEWLAGLLKCAKCGYGIRIYSHEHKYLSCFGKSVMHECTVTFSVKNITFEQVKEKVATQIQEHIHDIEHIIQERKANWFKLQKEIEKEEADISRLVQLALIVDVKEIGAQIKEKQTRINTLKLQGDFFTEQLAQYEDIDFIALSDDEKKKVANELIERILLSEDGSIKIIWKI

SEQ ID NO: 6703 - protein, 521 aa, unidentified
  source 1..521: note = uncultivated organism
MATVTMIPARQRVGSRKKEDSAPKLRVAAYCRVSTETDEQATSYEAQIEHYTEYIRKNPSWEFAGIYADDGISGTNTKKREEFNRLIADCMEGRIDMVVTKSISRFARNTLDCLKYIRQLKDKNIAVFFEKEGINTLDAKGEVLLTIMASLAQQESQSLSQNVRLGLQYRYQQGKVQVCANRFLGYDKDKDGNLVINPEEAEVVKRIYREYLEGRSYYDIGKGLTADGIKTAAGKDVWLASTLKRILQNEKYIGDALLQKTVTTDFLTKKRVANKGIVPQYYVENSHEAIIPREIFMQVQEEIVRRAHLQTGTGKRRVYSGKYALSSIVFCGHCGDVFQRTHWNLPSGKTIVWRCVSRLHKKTSGIDCPARTVTEADLHKVVVAAVNQALDERDTFLPALKESVGRALSSPNSGLVAEVDAKLEKLQKELLKKANAKQAFGSIADQIEDLREEKRQLLLEDATNEGVMQKVRELEEFIDSQGGPVTGYDEALVRRLIEKVTVYDDHFTVEFKSGLETDVMI

SEQ ID NO: 6704 - protein, 549 aa, unidentified
  source 1..549: note = uncultivated organism
MKAKIKRLFVIYSRKSKFTGKGESIENQIEMCRRYIATHYSEEEAEAALVYEDEGFSGGNLERPKFKKMMIDSQKIEYSAIVVYRLDRISRNIGDFAKLIEDLGNRHIDFISIREQFDTSSPMGRAMMYIASVFSQLERETIAERIRDNMHELSKTGRWLGGNTPTGYESECISNVTVDGKARKACRLKIIPDELNLVKFIFDKFIETGSLTKTDEFLMNGHYKTKRGKTFTRFAIKAILSNPVYMIADENAYNYLVENDVDLFADKEAFDGKHGIMAYNRTLQRPGKATQEKPINEWIVSVGKHLGAIPGVTWVQVQKLLELNKSKNYRKPRSHVALLSGLIVCGKCGDYMRPKLSDRRTATGEPIYTYLCTTKERSRGNMCDMKNANGNTLDRKAIETIKSFGKQSADMAKQITQTKKRISGNREGYEAELGKLRLQIEDNEKDIKSLIISLGKSEGTTAEKYIIKQIDETHEKGEALKKRLSELEAIIQQQDLGEIEFDIIRRMLSSMDESIDNYTVEQKRAAIRRFIRKIVWDGENAHLYLLHND

SEQ ID NO: 6705 - protein, 567 aa, unidentified
  source 1..567: note = uncultivated organism
MARMKKRYLEMPVETEAMEVLIVKYSVGIYSRLSVDHDDRKSESIENQIEIIRQYITTQNNNPKKKQKFEIYDIYIDRGISGTSFERAGFDRLMDDVRNHNVNCIIVKDLSRFGRDYLETGNYIEKILPFLGVRFIAVTDGFDSMSENISEKKLVMNIKNLVNDMYAKDISKRVMVARKIAAERGAYIGSTAPYGYTAEEINGIRKLVIHPENAGIVRYLFESYAFGISYGEMSSCLYRKKVHRISDYNKYGHTYWKNGEILHQWNPGVIKGVLSNPVYMGKLVQCKRKSRLQEGQKGNCHTGENEWITVENSHEPIIEQELFDRVNAGLKRMAKKPADKRKTGKGAVTDDENIFRHILYCGNCGGKMHATYYQSRVNGKKSYSYYCRRAYYIDGRRCSKNYIKEEQIERCCLEQMKQILKEQNLSSKALTAMNNLEYEKMKAAYLKEQNKIMQEKQKLSAQAAALYMQYKEGCVSNQEYSSFRENRSEYENFCEKRMEELKQKIRKSEIRAEEQNKFLRSLQKAKGCKKLNIQLIESLIEKITVSSDGVIDIQFRFKNEAGGECDA

SEQ ID NO: 6706 - protein, 554 aa, unidentified
  source 1..554: note = uncultivated organism
MAERSTRRPQGTRQVRCAIYTRKSTEEGLDQEFNSLDAQYEACAAYVASQRHEGWSLLSGRYDDGGFSGGNMDRPAMKRLLADVEAGRVDTIVVYKVDRLTRALSDFAKIVEVLDARGASFVSITQSFNTTTSMGRLTLNVLLSFAQFEREVISERVRDKVAASRKKGMWMGGSVPLGYDILERKLVVNTAEAETVRHIMRRYVALGCGRLLLEELLRDGVSTKQSHQRGGIPFARGSLFYLLNNRAYLGEVRHRDAHYPGDHEPIVDAELWDAVQATITARRSSDNRRANSASPSLLAGILFDRLGRRMVPSHANKSGRRYRYYVTTADAVTDIAPAARLPAHDAEEMVGARLGSFLTNKAELRRELMVTDAAELGAVTAAAATLAARLKRGANVTALVQRVDLSDAAVLVTIDREALSKLLAIDCPPGAAPITIAGSALRVRHGKEVRLVLNEPGASEDGARNPHLVALLTEAAGAKQLVDRSSGLSITQIAEQSGRCRSYLAKLYKLAHLSPDIIELIMSGRQPAQLTTRMLLAAKLPAAWSEQRSLLGTA

SEQ ID NO: 6707 - protein, 565 aa, unidentified
  source 1..565: note = uncultivated organism
MERAKSPVQRCAVYTRKSSEEGLEQDFNSLHAQREACEAFIKSQAGEGWRLVKTAYDDGGISGGTMERPALQRLLSDIDEGRIDVVVVYKVDRLTRSLADFAKMVEIFDAHNVSFVSITQQFNTTTSMGRLTLNVLLSFAQFEREVTGERIRDKIAASKKKGMWMGGFCSLGYDVRDRRLVVNQEESKLVRHIYKRYLELGSVRLLKLDLDRRGIVSKIRVSKNGRRSGGRSFSRGALYELLANPLYIGEIRHKKVRHPGQHEAIMDRQNWEKVQRLLRDQTARDGTPKIRAARNILTGKLFDENGKPLYSTGAKGRHGGSYRYYVSRELVRGGRPSVANEKSWRLAAPELEQSVVVAAGRLLNDHAAVATTLQEAGVSSAEIQSFLKAAEAKSASLASGSQQGAPTIVELVKRVDLRKNGMEISMNFESLLPPDSIARRTPLFTFSWFVPLQMRRRGVAMRLVIGGGVSKRKTDLTLLKAITRAHKWFSELVSGRAVFTREIAAREGVNERFVRRLLHLAFLSPTIVQAIVEGRHPVDLTCEALSRGIEIPVEWEKQNAALGFE

SEQ ID NO: 6708 - protein, 577 aa, unidentified
  source 1..577: note = uncultivated organism
MRKNDDCIAIYSRKSRFTGKGESIGNQVELCKEYIRTHYGEDTLDRIAVYEDEGFSGGNLNRPDFKNMMEAARKHKFKAIIVYRLDRISRNISDFSSLIEELSRLDIAFVSIKEQFDTGTPMGRAMMYIASVFSQLERETIAERIRDNMHELAKTGRWLGGTTPTGYGSESVAGVTIDGKSKKACKLKLIPEEAEIVKTIFDLYIETDSQTITEAELIKRGIRTKNNKYFTRFSIKAILQNPVYMIADEEAYHYFINADSDLFYNREAFDGVHGIMAYNRTSQEKGKTTEFLPPSEWIVAVGLHPGIIPGKVWVQVQESLERNKSKAYHKPRSNEALLTGFLYCSCGSRMYPKISRRRTADGKPIYTYVCKMKERSRQAMCNSKNVNGNIVDMAITTQIKMLAEDQDTFISQLEQSRKFYTGNRANYEKQLVSMRQKKADLEKKMDGLADSLVDLGDSVARNYVVKRMEQLGLECAGIDARIQELECLTSQHALSELEFDVMRQLLSVFKSGIDEMTIEQKRAAIRTIVRKVVWDGVNAHVILYGVQEDDREDDLKSLPGEASADTLPDPDTACSCS

SEQ ID NO: 6709 - protein, 534 aa, unidentified
  source 1..534: note = uncultivated organism
MAKKTDKQTPPTLRCAIYTRKSTDEGLEQEFNSLDAQRDSGEAYIEAQKHEGWTCIPTRYDDGGFTGGNMDRPALKRLLADIDDGKVDCIVVYKVDRLSRSLIDFSKIMDALERHKVSFVSVTQQFNTSTSMGRLMLNVLLSFAQFEREIISERTRDKIAAARRKGKWAGGHPVLGYDLASTPQGGRVTVNEDEAAQVRQIFDLYLHHGSLIPTMRDMDHRGWRTKRWTTKKGQTRGGRRYTKESLYRLLTNVVYIGKVRYRDEIHPGEHPAIVSEALWHRVQDAMRHNGRCGGTGSPVTRNKYGALLKGILQCKPCGCGMMHTYTSKANRRYRYYVCVNAQKRGWDDCPTKSVPAAEIERFVVDRIRAIGPDDKVLAATLAQARKQNQAGLAALQAERRRLERELAHPGADVRKLVAHPGASGNSGGSGGGESATAARLADLQDRIRAAERRVTEVREQIIAIGDKAVDGNELARALSLFDPVWDSLSPGEQGRVLHLLVERVAYDGGAGTLAITFRPTGIKSLAEQLENAAC

SEQ ID NO: 6710 - protein, 534 aa, unidentified
  source 1..534: note = uncultivated organism
MENNKGLKPNRCAIYTRKSTNEGLDQEFTSLDAQRESAESYIQSQKHLGWSALPDRYDDGGFTGATMDRPALQKLLEDIKAKKVDCVVVYKVDRLSRSLLDFVKMLQFFEEQQITFVSVTQHFNTNTSMGRLTLNILLSFAQFEREMISERTKDKMAAARKKGRWIGGRAGLGYDIDPASKKLVINPKDAELVRLIFKLYIEHKSLLEVARLVNEQGYRTKAHKDKRKILGNVPFKNTNIQMILKNVIYMGKVKYDGKVYPGLHEPIISEEIFNEAQVILKQNVRARGVSKNRKFPGLLSGIFRCAACETSMSHSYARKNKYKYRYYICLNAIKLNRQACPTKSISAVAVEGKVLELLARITKDGRLEEPAWGKLTFEQQATIINELVREIDYDGGKSKLRIYLKGDVRKYEYDLPIDELKKRIPSSSQPDFKSEPVIRQQLLLAHQIQQMLDSGRAKDLKQIAEWLGIHKSRLDQITSLLFLSPKIQESILQEDASRIARISERTIRSISEEMDWTQQESTWNQLFISAPPAA

SEQ ID NO: 6711 - protein, 519 aa, unidentified
  source 1..519: note = uncultivated organism
MIVALYARYSSDNQRVESIVAQLRACREYCQRYGYTIIKEYADEAMTGTNDHRPQFQQMLKDAEAGMFEMVIAHKVDRIGRNEFDYYTNRHKLESFGVQLAFAAQGFDVSTPEGGLMNNMLVGLAAYYSRNLSKEVKKGQRENVLQGKATGGKPLFGYQYTPDKHYEIVEHEAEAVRMLFRMYIDGYGYLQIAHELNSRGFRTRPGNPFGKNSLHDLLTNRRYIGTAILGKNCMTASGKRNNHRPDHDRMLVVEDVCPAIIEKEIFMEAQEKMKQRKNRKGANSAKHDYLLSGLIMCEHCGQAMTGSTSSKKGGPEYRYYRCPKKTRLGTHVCPNRSVPADQLEKLVIGQIQELFLDPDTLDELMDKVEVNYRQMSEKIETEIKDIKKELLEVDKQIDKFYDFVCDGGDVDERAKERYRKLKEKYENLSAKLEEKEASRPANISKGTIRKYIERYRREMETGKAPNLKGTIAAFVKKITVSNSNITVKYRFEPTLSRIDKFDLYGALGGSRTHAFSSGG

SEQ ID NO: 6712 - protein, 662 aa, unidentified
  source 1..662: note = uncultivated organism
MIGLYARKSTKQEKANDEEKSVPMQFEAARDFAAQQPWTEEIPEDLVIGDDGISGGEFDPKKRPGLAAVMQAARDGRLTILITRNQSRLARRQRYAMDVIHDLTDLGVKIYFYETGQEVKFDTATNRLLVGIQAFGDEHYRESNVKTGRDRMRQKARRGDVCGSVPFGYEPRCTKCHKATRPRRSCDCKAVIERLIVEPHRPIVVRIFTLVAEGHGFQKIAKRLTAERVADRTWSGSTIRAMVHNELYRGVFWYGRTQKEDHGQSSRKVRSENVVRKEMPELRLVSDDLWNAAHARLKNTTAAYLRFTNGRVWGRPESGTVSPYLLTGLSVCGQCGASLLVRTLKGGRYAYYACSYHHLRGDKACPNNLTMPMKAADTAVLTELREHILNPKALAYAIETVIARLGTSPKNIAEQRAGIERELAKLGAEIDNLYAHLASGLQGIPEQIKTRERRQETLRATLHRLDLLASMPTFDQAGLTAELRSRLDEWRSLLAAESVKARQIIRKLVGERIVFTPEPSEHRYHFAGHAEYSKVLSGTLFQSFALTGSVAQAGLPQVARGGEETWGGMNSTKHEALPGVPQVRLGVSEASPRENNSLDTSLVQNRASRGPLLYTKADDGDSDAPAAPAAFDRPTVCGTSGDGNGKRDTGNGPVMRPNRAIL

SEQ ID NO: 6713 - protein, 559 aa, unidentified
  source 1..559: note = uncultivated organism
MSAKTVRCAIYTRKSTEEGLDQQFNSLDAQREACAAYVKSQAGEGWKQFSTRYDDGGFSGGTIERPALQRLLSDVDHGRIDCVVVYKIDRLTRSLADFAKIVERFDQRQVTFVSVTQSFNTTTSMGRLTLNVLLSFAQFEREVTAERIRDKFAASRAKGIFMGGTPPLGYDARDRKLMINPAEAKSIRFIFKRYLDLRSVAKLREELEAKGITTKAFVSTRGKAIGGGRWYVGPLRHLLRNPVYAGLAKHKGTLYPGAHEPIISQSLFDQAQAQLGTSARAVHRKRTVEASGPLAGLLVDDKGNRMSPQWSVGQSGSKHGYYVSQALLQRRRAEAGSLPRVAALLVEDLVVRCVMAFESDQAIAATPGAPTGVRMRHAIAERIHARVTSIVVGANILTVELKTPEGGVGTKVKAGRLKLAGANLPEGAIVTEMPQGIRITIAGPLKQRGGIKRVEVWSKEDWSLSVPRIDQGLFAALVRAHRWRAAIERGDVTSVDDLAKREGLHRRRVRELLRLAFLAPDIQQAIVEGRQPKGLGLERLTETGPPVSWLEQRRLLGLA

SEQ ID NO: 6714 - protein, 575 aa, unidentified
  source 1..575: note = uncultivated organism
MNSNQNLALDTEKKRVRDLLRVSSSQQLDEGGDLKTQRKIVEEYIASHPDWYYDGTEYFEGGVSGYKNSVADRDVLQEAYRDAQNHEYDILVVYKDDRLGRRMWEIGGYVMSLKSLGVDVYTVKDGCISPETDDIMGQMMLALRYGNAQKSSADTGMRVKDTAKKLVTQGKFMGGKAPYGYTLERSGEISKHGRALKHLVIQPEQAEVVRHIYNLSLTKEYGSAKIADTLNRDEKHRQLAPNDVWKSGAITSILTNPVYAGYTAYNRRERLNGRSRSLDNNEWILSTTPNPDIVIIDEDTWTKVQIKREQRRKKYTKSLENQDVTVISRNDGMLSLVDVLHCGYCGCKMVNGSRYNYWTIKDTGERRTSKIPIYKCQNAWQGVPHDKTKQFRADKIEPIIYGAMADYINRLLENENIFEEITENHKKEKQRKESDLTMEQKKLEKIQHNISVMEEHIPDAMTGEYPLSLDDLVHNINTQKEKEQEQLAIVQQKEAELQNSSVTSKDWENIRNKIPTWRELFLYADTPTKRVLVNKLIERIDITKERIVVQFKIRLDDFLPQTRMDNNGVVPRQRV

SEQ ID NO: 6715 - protein, 632 aa, unidentified
  source 1..632: note = uncultivated organism
MTNSQFIALYARVSTEEQTENFSIPAQMELLRSYCRSMNYTIYSEYIDAGYSGTTQDRPELQRLLRDAEQGKFQVILVYRIDRFFRSVKDLLFIVDYLDSIGVSFRSVTEPFDTMNPIGKFMLSLLGSIAQLERDTFIERSRMGKMRRAEEGYVVLTHPPFGYDYIIPERKTGDDGKKQKNGKRGYLVINDEEAETVGLIFKEYIKPDSSTYSVAELLTKLGKRTKRNGKWTGERVYAVLTDTCYVGEWLYKGIKVQIPSIIDRETFDKAQNLLKERRNMIHRKTPRQYLLRGLLRCGYCGSHMGGTTEVAKHRKNGKKYGEPYGETHYYRCHKNIMSSRNKRADRCDAPWIRGEELERHVLSYLALTLSNSERLQEAINSHNNSTGAKRAELENKIKDLNKKLMKLLNEKERILQAYREGVIEISDLKKEIDLVKEKQTSLEQNIEELRLYLNLENERINNINNLAEKYKNLNLENILNAPFNEKRDLLMKLVSNIWVKSRDNPIKVNIECIIPELDHPLDERAGTTTPLALHARDPSRKKLAWCLCQWVPVCRIRCRSQSGPRQAEGRPPHRPQASVSASGRLSTGGWPNIRRFFQPLPVHGKKASLLSPGAPGRSCSQTSRGCRRMRAG

SEQ ID NO: 6716 - protein, 556 aa, unidentified
  source 1..556: note = uncultivated organism
MKAAIYLRVSTEEQRERQSIQTQRAEVLRYCGTHGITGPEFYEDNGVSGTVPFEQRPGSARLFQDAREGKITKVLIYKLDRLGRDTRIILNTIKQFEDLGVEIAATSEPYDSATPAGRFMTTIMAGQATLERENIRERAMAGINRLVREGAGVGGIVPYGYRVEGRRREGRLVVSDTPVPGTGTTESDVIRLIFRMVGDEGKSCVAVAEHLNRIGVPSAYGRDAERGKRVRATSGRWRDCRIHYIIRSTTYRGVHIYGKHPHGVRHDHRLIERLVPAIVDATLWERAQATLKRNLRFSRRNAKRQYLLRGLVRCAHCGWTYTGTATRGTRFYVCGSRAQGKKAFPNREDRCRSKQISGEIEEIVWRDIEGFLRDPGPVLDELASKLLMIKSTAASAAARLAALKATLSGKGEERDRVVALFRRGRIDESMLDRQLDEVERERTALAEEIAELETAGARARDTEAQLQNVGDLLRELSRRLDEPLTWELKRRLVESLVEGVRVETVGEGAERYSHVTVIYCFSVPDDPIAHYTPRRTTSSPRPVCPRRPRSRPRCDR

SEQ ID NO: 6717 - protein, 582 aa, unidentified
  source 1..582: note = uncultivated organism
MKTAVGYTRVSSSSQASPEKTSLERQAEKIELQARLKEYNLLKIYKEPGISGATMERPALQELLADAEQKRFDAVIVWDISRFGRNLLHLKQNTERLKELGIAFLAIDNGIDTANRDKTGELLLNILASIYEFELETIKERTQGGRDAKRKKKEYFPGKTAYGYRWNAQELRVETVEAEKPIVERIFKEYIYLNKSIPTITKGLQDDHVPTRSGTKWGDSVVHRILRNPCYTGTYIVNQHITNAKGEVIGEKPESEWVYHDCDPLITPTDWQDLQKKLDKARENNAGAPNPESQKYIADGLLRCGICGSTMRLRHTRRNKAGKCHSYYQCYWNGKSQRAAEIKGKKLCEMVPIPAAIMDSHLFELRLRLKLGMDWERKYEDKVNPSIAIDLDKSRQRVENIKISIASNKTAMTNNDRTQYRKDYDPDKYIARNNELNLERANLQRELAEAEREHNRYQQLFESEQNFVRLAADKDKIMELFRQLVALPVEQKRRLLKGLVDGEIEVTPLGPLDVSEEGNALNGWTAINWKYNPAIIQEILGVIILDVDETTGEGSGGIPHHKIPVPPEGGSPMTETITTILE

SEQ ID NO: 6718 - protein, 546 aa, unidentified
  source 1..546: note = uncultivated organism
MNRRSTTIRSSKPPAIRCAIYTRKSSEEGLRQEFNSLDAQREAAEAYIASQKNEGWVALRDRYDDGGYTGGNMERPALARLLADIESGKIDCVVVYKVDRLSRSLMDFARIMEAFDRHKVSFVSVTQHFNTTHSMGRLTLNILLSFAQFEREIIGERIRDKIAASRQKGKWTGGTPILGYDVDRSNGSPKLVVNPAEASRVRQIFEMYLEHGTLLAVVAELDRRGWHSKVWTTREGTRRGGLPIDKCRLHALLTNVLYIGKITHKKEVYAGEHEAIVPQDVFHNVNTRLLQNRNSGCVELRNRHGALLRQLLFCKACGRAMVHTFATRGNKRYRYYTCTNAIKNGRRKCPTASLPTGEIEKAVVDQIRCIGQDSDLLGETLRQARTQAEEAIGRLSDERRLVERGLARCHAEIRRTTTAEPLTDAVAARTADLTEQIAKSDRRLPEIDDQIAELRRDQVTEADVTAAFADFDNVWKALRSREQVQLINLLVHRVEFDAADSSIEVSFYASGIKSLANSGDDPAPPETKLPIERAGKRRRAVEEVAA

SEQ ID NO: 6719 - protein, 517 aa, unidentified
  source 1..517: note = uncultivated organism
MRAAIYCRLSKEDQDAQKRGRESESIQNQKSMLIQYAVQHGLEIYQIYCDEDYSGVDRNRPDFNRMIEAASQKKFQVILAKTQSRFTRDMELVEQYLHGKFLEWGIRFIAVVDHVDTEDLAGKKSRQINGLINQWYLEDLSNNVRLVLDHKRKKGEYIAAFALYGYQKDPQNHNRIVIDPPAAQVVKRIFSLYLEGNGTTKIAHILNQEGIACPTRYKQQNGFGYKQAASTQTAWSKATIYRILTTQTYAGDMEQGRHKKISYKSPKTVWLPKKDWIVVPDTNEPIIDREMFDRVQQMLAQRARGGKSGTVNPFAGKVFCGLCGCAMEQTGSGANNAMRYFRCRMSQRDKSRCPGQTYIPMTALKQLVTERIRQHSSTFFQPETVDMTPFEQQMEGKHSNRQNELERLEHEVQRRTTAMQELYLDKSSGLLGLEEFRQLNEAYQRQIQQYHRQIRTIRQEMADEEPMELQRQRMMQQIQEQIGGKTLTRELVCLLIDKIVVYPVADCTRTIQIQWRF

SEQ ID NO: 6720 - protein, 573 aa, unidentified
  source 1..573: note = uncultivated organism
MNNTVAIYSRKSKFTGKGESIENQIELCRQHIRAHYGENTEMLVYEDEGFSGGNLERPKFKMMMLDAKEKKFSAIVCYRLDRISRNIGDFAKLIEELEELEIAFVSIKEQFDTSSPMGRAMMYISSVFSQLERETIAERIRDNMHELSKTGRWLGGITPTGYTSEKIENITIDGKVKKACKLKLIPGEAEIIRLIFDKFLETNSLTKTETFLIQKGYTTKNKKLFTRFAVKSILQNPVYMIADKDAYCYLCDNNVELFAEESDFDGRYGVMAYNRTLQRPGKANQIRLVEEWIVSVGKHTGIIPGNIWSKTQELLEQNRSKSYRKPRSNVALLSGLLFCGDCGDYMRPKLSQRLNTQGEQIYSYLCSLKERSRSHSCNMKNVNGNTLDKAIAEEIKKLSADSSEFTRRLIQSKKELAANRDECENSITQLRNFLSDNEREIQGLVSALGKASGSAAESYIMQQIEELHEKDESIKEHLAELEGLIAPQPFADIEFDIVRQLLSAFKDTVEIMTIEQKRMAIRNFIKKVIWDGDNIHVYLFGSDEETEETDSPDATKSAFEAEGELEPLGEDSK

SEQ ID NO: 6721 - protein, 523 aa, unidentified
  source 1..523: note = uncultivated organism
MNQILAVDKNRVATYIRWSTDEQTDGTTLEVQLEACRLFIQSQGWTFRDDLVFVDDGYSGSSLERPGLSRLRQAVSEGVISCVVVYKLDRLSRSVLDTVNLVLKEWDGVCSVRSTREPVDTTNPAGSILFYMLASYAEWERSTIRERTFSGKVKRAQQGRNPGFPPPYGYARGPEPGQFAVYEPEAVVVRRIFREYISGKGIHTIALGLNQDGIKPRRADRWRGETIIKMINNQIYMGVLRYGMSTLTTPAQRKQLKKFRVFFDEPRLASVSGVVEAIISPEDFERVQRVKASRNSTVGCRARGSDFLLTGIARCKCGATIRGDGRRKTKRYYRCSGAQTSNPHRCDCGLINAAKLDALVLAKVREALAPENRAILMATWNEDNAGKMAIVLDELRQVEASLVQLDKTRSRFTADYKAGDLPAKLYAAHCEDLDKDEERLKAALSALAEERGRLEAGRCDISEFDQVSSQLDSWEMLSPEEQKQALRHAIGRCVVYRKAVGAANRMPNPGQVEVDLEIRQLGS

SEQ ID NO: 6722 - protein, 574 aa, unidentified
  source 1..574: note = uncultivated organism
MNTNLNTDVYTADIYLRLSREDGDKEESDSITNQRELILEFLKSKKDIRIHAIRVDDGYSGVTFERPAFQQMIEDIKTGEVNCVVTKDLSRFGRNHIEVGKYIEKIFPYLGVRFIAINDNYDSIESGTQADNIIIPFKNLINDAYCRDISIKIRSNLEVKRKRGDFVGPFAPYGYQKSESDKNKLEIDEEAAEVVRFIFRLYLQGNNAYKIAEKLNKKNILTPMDYKKENGSAFYTGFKKNLKSQWTHMHVLRILGNPVYTGTLVQGKETTPNYKVKRKVKRDQSKWSQVENTHEAIVTSIDFNNAQEQLQMDTRTGNAKEKVYYLSGIVKCGDCGANMVRKTVPSGKRKFIYYVCGNHKGNKNICSSHCINAEALEESVLKLLNYQIKTVTDLAQNLDKLEDAQIQKAEMEKRNRQIAKKKEEIQKYSRLRLDLYEDYKDKLITKEEYLELKEIYEKRMQAAEQMLEAMEVEGVFHANGKKSMCSWVSEFKKYGHLECLSREVVVSLIEQILIYEKKEGERYPRIEIHFKYAEEFQTSLSLVEELHLDSDILTADKNHCFQKKGKEGTYGEDE

SEQ ID NO: 6723 - protein, 531 aa, unidentified
  source 1..531: note = uncultivated organism
MSRRRASVKATPRGPATRCAIYTRKSSDEGLQQEFNSLDAQREAAEAYIASQKAEGWVCLPERYDDGGFTGGNIERPALQRLLADIQAGMIDCVAVYKVDRLSRSLLDFARIMETFEQHNVSFVSVTQHFNTSTPMGRLILHILLSFAQFEREIIGERIRDKIAASRAKGKWTGGTPILGYDVDRSNGSPKLVVNGTEASRARQIFELYLELGSLLPVVEELERRDWRTKVWTTRAAKRRGGLPFDKCHLYNLLTNVLYAGKIKHKTEVYDGEHEAIIPEDLFRRVQNQLQQNGRTGSAELRNRHGALLRGLLYCKACGRAMVHTFTSRGRKRYRYYTCTKAMKNGWSKCPAKSLPAAEIERAVVDQIRCIGQDPELTSETLRQARGQAEIGIERLAGERRIIERGLVRCHAEIRRMATSEPPSSATTARIADFHDQVRESESRLAEIDAQVAELEADLVDEADVAAAFADFDNVWKALSPREQVRILKLLISRVEFDAASSTIEVSFYLSGIKALADGGGQDAEEVEDAA

SEQ ID NO: 6724 - protein, 579 aa, unidentified
  source 1..579: note = uncultivated organism
MRTKTLDLSFPPVEEKAVPVRTIKKINPVVRNTPLTRVASYIRVSTDHEDQKESIAIQRQHFNSLAKRQPDWVYVGCYWDVMSGTKKDKRPGLQRLLADCRAGRINLITTKSISRLARNVADLLEMVREMTATGVRIIFDRENIDTGMMDSELLLTILASMAEEEAKSFAANNRWAIQKRFKDGSYRRGVAPYGYDLVDGGLVVNPTEAETVKYIFDRMLVGAGCSTIAKELNEKGIPTKRINESRKDGKVHSGKWNAATIRGMVRNEVYMGDSRLQKTYKDTLFKTHLNEGQLPQYYYEDNHPALISREAFKGANAVLDQHFKECGAKKAPSPTYTFTKKLYCKECGALLWRCGDTRKRNKYSYWLCSTHHKNAKACSLKRVMEDNVANSFTMMMNKLHYCDVVVIAHRDVLRKAWREAQGERLKSLEAGLAENSINQLNLIAQRGRMDQALFHTEMDALQVQEVQTRAEIDIIMDDQVAEAEKLLAVVQAWGPKKTFKPETFEMLVEKVVVVDREHFEFHFKCGLVLTEGVVYELPEAKPAPQPMLQLPEAEVEIEEDTPQRQVITIRPVRETLSRL

SEQ ID NO: 6725 - protein, 524 aa, unidentified
  source 1..524: note = uncultivated organism
MAEKTVTKRLYCAIYTRKSTSEGLDRDFTSLDNQRESAESYINSQKSEGWILLPDRYDDGGYTGANTERPALQKLIADIKEGKINCVVVYKVDRLSRSLLDFVQLLELFEKSGVVFVSVTQSFNTNNSMGRLTLNILLSFAQFEREIISERVKDKMGAARKKGKWCGGRPILGYDLDKVNHKIVINEKDAKLVREIFDLYLKERSFLSVAKILNEKGYLTKRHPTKSGDHGGIRFKNTNVHHIVKNVLYTGKVKYNGEIYKGMHEAIISEEIFNKVQEISANNRVRRDYSKTTRNTGILSRILRCKACNGIMFHTYTSKKKDRKYRYYVCLNAHKRGYDNCPTKSVNAHHIETAIIDSLRKIAADSELRKGALEDVNKHIRQEIEAHNKETKVLIEKARSLHNKIDNLKETLKAPAENKREMEQELKHLTAKYGEYDCLLTAARLKEMSLGQKILTDRELEEALIVKAPIWNTFFPQEQHKALRLMLKEVEYNGSDGKIALTLNHGGLKLLYLLLHPNLQKDLK

SEQ ID NO: 6726 - protein, 543 aa, unidentified
  source 1..543: note = uncultivated organism
MTTTLPENNRVKAVGYCRFSSDMQREESIDAQMRYITGYAAQYNYEIVEFYCDRAKSGKNTNRPEFQRMLEDTSTGKFQAIIVHKIDRFSRNTEDTLRIIDQLKSKNITVISAYEHFENNPMGNFMLTMLSSMSEYYISNLANEVLKGQRENAYKCRANGGKGCLGYDIVNQKYVVNKEEAKSVRLIFQMYSEGYGYNSIIDRLNTLGYKTKFGKPFGKNSLYSILTNEKYTGTFLFNQIARGNSHGKRNSHRLKADSEIIRIEGGIPAIISRDVWNRVQAVRNINPKGRSQAKHFYLLSGLMYCGECGCKMHGNPRNTGNGGPLYVSYRCNHRDNNHSCNNKEVRKEYVEGFVVKELFRHFQESAVSEITKQLNMKLLEDSKSNNEEYTKYNGTLAVLKKSRSNLVDAIENTGFNRTLGNKLKDVEKQIEDCEALLRQCEEKRDNMPVFTEEQVREQLPKFNCLSEPTHREEIRLTIQKHVKRVTVFPDRVEAAFKAAFDPGSGKSVTYNCTSSVSRYSLRQYGSVKVLEGLETEKNSLCSA

SEQ ID NO: 6727 - protein, 542 aa, unidentified
  source 1..542: note = uncultivated organism
MREQQEYTAGIYCRLSSEDCADHESMSIANQRDMLTDYVRRNGWSIGSEYVDDGYSGTNFQRPNFQRMIADIEAGKINMVVVKDLSRLGRNYIMCGQYTEIYFPERNVRFIAVNDGVDTLNDVGGMDITPFKHILNDMYAKDISTKIKSSLHTKAVRGEYLGALDPYGYIRDPKDKHKLLVNEETAPVVQRIFEMCAGGMGSRSISTRLNTEGVLSPAEYTRFKKHDPEKDGEFVRKKFWCQTYIRTILQNEMFIGSMVQGRHCTPSYRTKKRVKCEKDDWIVVPDMHEAIISKELFEQAQKSLHSRKIEPRKDSPHYVTPDVFSGLFRCEACGTAMRKHRTHDGKYIYYVCGRHHQQGSFACSSHYINCDVITQIVQDDIKRNAVLFSEDTERAVKELTDKKCSEDEKRLAQMKTELTSTKKRLGEMDAKLRRVYEDNLSGKLPDHIFSMFVTDYDSEKASLRESVRDLEKRIDASNAARSDVEQFSKLIQKYTSFDELDSFMLHELIEKITIYETPGMGRNRIGKEKVITIYYKFVGALK

SEQ ID NO: 6728 - protein, 539 aa, unidentified
  source 1..539: note = uncultivated organism
MKVDIIPKKQTANDGIKKVCAYVRVSTDSMEQEESLENQTAFFRRFITENPSWEFVGIYADQGITGYVENRPEFQRMLQDAREGRIDLIVVKSVSRFARNTETVLKFSREMKRIGVGIFFQLQNINTLTQEGELMLTILAAFAQAESESNSANVRMTIRNKYKKGEAVWNLAGLFGYMEDEDGDIVINEDEAKVIRLMYDLSEKGIWSSKIARYLNERGMFTRKGCKWSSATVRKTLNHEAYKGDRILQKTFNDGHRKTKKNEGELDQWYLTDVHPAIVSRRQWEAVQKNLEERSEAYTYKKPVEKKKHHPHSRYPLSGKLYCAHCGCLLYHKWDSDQSFEYWMCSTRVKWSPESCPGTYVPAKFLKGWEGIDEELVVVQYKDEYGMDRVEAYPKEEWEQEHSYPYEYHRPEKPKKEKPKKRDVVRRHHPDEPEGRRYTRSTYPHSKKLYCPYCGRTMIHKWDGGVPYWQCSSQKNRYRNPDEPKCPMKYLPCEISDTWGEIKEPVTVIPFEDEVGNRFFTYMDKKEYEASDDCPYGKD

SEQ ID NO: 6729 - protein, 539 aa, unidentified
  source 1..539: note = uncultivated organism
MLAALYARVSTTRQAEKDLSIPDQLRQMREWCAARGHHVVVEYLEPGMTATDDRRPEFQKMIAEATMKPRPYDLIVVYTQSRFFRDAVEFGLYERNLLKAGVKLISISQEVGDDPAGGLMRRIFSVFDEYQSRENGKHTLRAMQENARQGFFNGSKPPFGYRAVEVEAPGRHGNKKRLEIDPGESKMVKRIFALYVDGRNGHDLGAKQIAEALNDEGLTYRGVRWNRALVHKVLANRAYIGEYYFNTCHNKTKQAKPEAEWVRIDLPPIIEPEVFEVAAGKRSSRAPEKVAPAVAGSNHLLTGLLKCGCCGAGLTTATGKGGRYRYYKCHTRLSRSVKACDNPPVAMEKLDDLVLGAIADHVLSPERLMTLLSSLQERLSQVQAAASHETDAIKAELEEVRVATQRLYEAVEKGFLPIDATLQERTQQLQARRQALMLKLGRCQKPHEVQLDALDPKAVAAFGEALRRKLRDRSSGFGRRYVRLLVNEVRVKGKCAEISGSNAALLQAFRANEKGTPDKSAPFCHSWLLDLGSNQGPTD

SEQ ID NO: 6730 - protein, 578 aa, unidentified
  source 1..578: note = uncultivated organism
MSTLQKRSIHCAIYTRKSSEEGLEQSFNSLDAQHEACQAYILSQRQEGWRAIDAQYDDGGYSGGSMERPGLKRLLADIEARKVDTVVVYKVDRLTRSLADFAKMVEAFDARGVSFVSVTQQFNTTSSMGRLTLNVLLSFAQFEREVTGERIRDKIAASKRKGMWMGGMVPLGYDLKDRHLIINKQEAEHVREIFRLYLELGCVKKLKAHLDRRGVKSKIRISRSNRSTGGTAYSRGALYKILQNRIYLGEIPHKGQSYPGEHLPIVDRELWERVRALMSENVRSRRHGTNASAPSLLRGLLYDEDGNRFTPSHAVKRGKRYRYYVSQRVIKDAASASTQPGRIPARELEKLVLAKLKSFFSSADQIVSALALPDDDLGMTQKLIESAVGYSKRLDGNSPSSLSEMLEMIVTCILVHPESVEIQLDRAKLRVQFLGSHHNDPQAQNTTNDVRQEPITLTIETRLKRCGGEMRLIIPSQSADRAPGNALPALIKAIVRSQQWVRQIVAGEYKDQRAIAAANGLSERYVSRIIQSAFLAPEIVEAIVKGRQAPDLTLLSLLDDVPHSWAEQNTKLTVAYEK

SEQ ID NO: 6731 - protein, 529 aa, unidentified
  source 1..529: note = uncultivated organism
MMFETNLALAQQPRITVIEARKREAAKLRVAAYARVSSDSEDQQNSYIAQLDYYAKYIAAHTDWEVVDIYADDGISGLATDKRDEFNRMIQDCRDGKIDRVLVKSISRFARNTKEYIQYVRELLRMGISIQFEKENIDTGKMTSEQIATIYGAFSQMESQNHSNNMRISVRIRMEKGDYLSPSTPYGYRLEERTLEVIPEQAEVVRRIYAAYLSGQGKDDIARQFNSEGIPRTGGREVWHPSTVSYILTNISYTGNMIWQKSFATNDIPFRQVRNRGEKPRYFVEDCHEPIISTEEFQRVQTLMESRRSRQQHGKSGTENLLAKKIHCGNCGTLFRRKTVNGKTYWTCHRHDRQKDFCGISQIPESELIRAVLRMYHKLKAHTAEILAPVLDQLTELREKELRSNRKINDIDKEIAQLAEQNHVLVRLKSKGYVDSALYLSQTEEITLRLRELRAQRRRIMDATGEDSQQKATEAMLDYLDGSPEVLTELTEELFESLVDSLIVLTETELNIRLHNGLILKETMERMAR

SEQ ID NO: 6732 - protein, 568 aa, unidentified
  source 1..568: note = uncultivated organism
MKSSKNNNKDERKIAIYSRKSKYTAKGESTFNQIEMCKRKIAFTFDDINENDILIYEDEGFTGYNMNRPAFQNMLKDIRNKKIKAIAFYKLDRISRNVTDFSNLVTELDNFSVSFLSATESIENITPAGRAMMFMISVFAQLERDTIAERIRDNMHELAKTGRWLGGNCPTGFESEQIEEISIDGKKRKLFKLSPIDDEMRIIITLFNKMKELKSQTKLETYTIQNNIKTKNEKTFQRWGLKNILLNPVYAIADKDTLEYFKRYDIEIFADESEFDGTHGLMAYNKTEKRKNTVERKDISDWIVAVGKHKGVISGKDWVEIQDMLDKNSDKRYRRPGVNNSLLSGIMSCSHCGSVMRPKLKRKDTDDKGRRHFDYMCELKEKSRKHNCQCRNLNGLEADDLVMKEIKKLGMPNSKFYKALKKMATGTFNKDDKKSQELKTLKSALSKNENDIATLLDKIKIIDNSLLDDLTNEIKKLKESNIEIETRIKELTNTNYNQVDDKETAQILLNILDTYISNFDSLDLNHRRHLIKLLTGSITTDGVDITLNFLGLRNSDNNYMFPTSDSSK

SEQ ID NO: 6733 - protein, 558 aa, unidentified
  source 1..558: note = uncultivated organism
MSKVTLRCAIYTRKSSEEGLEQGFNSLDAQREACEAFVLSQQHEGWKAIPTMYDDGGYSGGNIERPALKQLLADIDQKKVNVVVVYKVDRLTRSLADFAKIVELFDAKGISFVSVTQQFNTTSSMGRLTLNVLLSFAQFEREVTGERIRDKIAASKQKGMWMGGTVPIGYVGFERTLVIEEDHAKLIRHLYERYLLLGSIRSLKMELDKTGIYAPQRNYASGKEYGGVPFSRGNLQRILSNPIYIGKITHFNKVFEGQHPAIIDQALWEAVENKRVDNQQAQEQRPKAPSDSLLTGLLFNSEGLRLTPSHSQKQSKRFRYYLSQQLVNESKASAPNGIRIPAQELESIVINQLCDWLTDSDAVINALNPEPEQMQNLIADSVKLAADLQGNKTEQYKLLRQIIERVEVGNSHVSLLIKATALIIANAESSDTPDKLITLRTNVQLKRCGYAMRLIITDSDKKQTFKDQRLIDHLSKAYQWLTLITLGKVQSIKEIAEAEGLDQTHVTRIINKAFLAPDIIRAILNGTQPAHLNLKYLKQFRVLPNDWNMQKSLLGFNK

SEQ ID NO: 6734 - protein, 537 aa, unidentified
  source 1..537: note = uncultivated organism
MSRQYERNSTPTHQSMENRRATVRCAIYTRKSTDEGLDQDFNSLDAQRESAEAYIASQRHEGWLCIADRYDDGGFTGGNMERPALKRLFADIEAGDIDCVVVYKVDRLSRSLLDFARIMELFDKHAVSFVSVTQQFNTTSSMGRLTLNILLSFAQFEREIISERTRDKMAAARKKGKWVGGMPVLGYDLDRKGGRLVVNEEEAQQVRAVYDLYMEHKALMPVVQELERRKWGVKKWTTQKGEERGGNLFTKSSLFRLLTNIIYTGNISYKGTVYPGEHEGIVALDLWQQVQDTLRHNGRSGGKEIRNKYGALLRGLLYCAPCGTAMVHTYTARKGKHYRYYVCLTAQQRGWASCPTKSLNAYEIEDAVVDYIRGLGANQEVLSKTASQVRVQSEKRLAEIETERRAHERELKRLDARLRALVGDLPSSGTDHGLATDQMADLQDQIRSLEQRMTVIREETIAVQRETLEDEDLEKALAAFDPIWQSLAPGEQSRVIKALVERVAYDGRDGKVTVTFRSPGIKAVCLGQAALGKENRI

SEQ ID NO: 6735 - protein, 524 aa, unidentified
  source 1..524: note = uncultivated organism
MSEAVVRKVIKTIPATRDRYTATPIKAETKRRVAAYARVSTDDEEQQTSYEHQVTHYTQYIQEHEGWLFAGMFTDEGITGTSTKHRDGFNAMINAAMAGKIDLILTKSVSRFARNTVDTLTTVRKLKAAGVEVYFEKENIFTLDSKGELLITIMSSLAQEESRSISENVTWGMRKRFAEGKPIIPYGAFLGYRKGPDGMPEIDPEQAETVRYIYRAFLEGKAPSYIARDLTARGILTPGGKTTWRANTVMSILTNEKYKGDALLQKTFCTDFLTKAYKVNEGEVPQYYVEHSHPAIIDRAMFDAVQTEIKKRAEPGQRTYTPYTLSGKIYCAECGARYGSKMRRGKQSWCCNNRHLGRTNCTAPVLHTETIEDAFVTAFNQVIERKDEIIRICMDTMTERCDVSGIDARLATLNTELDVVAELIAQNIATNARVALDQDENRQKFEELMARHDSIQNEIHELERQRAELIAKLNGIRHYIGVIQDEGRITGFDETLWLNTVDRLWIKPDGTMRFEFKGGPAIEG

SEQ ID NO: 6736 - protein, 520 aa, unidentified
  source 1..520: note = uncultivated organism
MKPGLRCAIYTRVSTEHGLDQEFNSLDNQREAAEAYVKSQAHEGWRCLRDCYDDGGFSGGSTERPALQRLLDGIKARRIDVVVVYKVDRLTRSLADFAKLVELFDQHDVSFVSVTQAFNTTTSMGRLTLNVLLSFAQFKREVTSERIRDKIAASKRRGLWVGGMVPLGYAVENKKLVVIDEEAERVRLIFRRYLETGSIGRLLVDLRERGILTKLRPLSVGRTIGGIPFARGSLAYLLRNRFYIGEISFKGAIHKADHPAILERELFEAVQQRLVEQRVAEPSVRGRSGAILAGRIFDDRGGRMTPTHAKKGGIRYRYYVSCALVQGQVNQAGSVKRVAAPEIERVVADAIRAETGSTETDDGAVVATHLGRVELRQNTLAIQLLASSDAEAPTIHVPWTKLTTTRHRETISSPDQQTPARPMRIETRATLLGAIAKGRRWVSEIANGTATPNAIAARERCSPRQVAMTISLAHLAPDIVEAAIAGRLPHGLGMRELRDLSTTWSHQRISIGLSRPSPNP

SEQ ID NO: 6737 - protein, 611 aa, unidentified
  source 1..611: note = uncultivated organism
MEERKIAGIYIRVSTEDQAREGFSLGEQEEKLKQLCEYKGYEIYKVYCDAGISAKDMEHRPKFQEMLQDMRDGKINYIVAYKLDRVTRSVRDLEELITQLEKHNTYLVCDRDDVNTSTANGRFFVRMLTVLSQLEIEIVSERTKFGMVGAIKSGHLPGVKPLGYKNDSTRRTIIDPATAPIIKRVFDLYLQGKTYLQIATIFNNENILNKKWRDCYIEKIINNKVYMGDWEQYKSIGKKEGLEPIIYMNVVEPIVPRYIWEECQAQKVINQRTYTRDRVYTFFQKIKCPHCGRIMKCKGAGGKKRKYVYYNCEKCHENIRETYIEEAFRTLVVELIQFDNEYNDLFLPLFADKEMYVDKSDIEKEIIRLTKQKDRIKKAYMSEVVELDDFKEDLKLINQKLDTLTKQLENEKDLNSRNNFSPEKVMVKRDINRIFLNTRYDNKFFLAQWDMKTKEEKQEFISRYIESMTFKKDKNCKHGIRIVDLKLKSIFKEKVNKLSEIGASEIPVYLISNDKPVRVNIGCPLKESQIKEYLNELNKYHATNFYIHPTFNHSIEDLPDEIIFNINADEKLFRLIPIIKDIDNPENVFNKFKLGIVTTSIKSFPCVDPNK

SEQ ID NO: 6738 - protein, 518 aa, unidentified
  source 1..518: note = uncultivated organism
MAVQDNLARKPIYIPATQPEGELYLRVAAYCRVSSDSDDQLNSFAAQQNHYYDYINSHDHWELAEIYADEGITGTAAKKRDDFQRMLADCRKGRIDKILVKSISRFARNTTDCLEALRELKSLGISVYFEEHNIDTKMVSSEMMTAVIAACAQAESESISKNMRWGVQKRMGQGTYISSSVPYGYRLNGKFLIIDESEAGVVSRIFEAYLEGQTPTEIAEMLTLEGNTDREWRASTIRYILRNERYTGDTMLQKTYTTETLPYRRKINKGECTKYFVEESNQAIISKEIFEAVQRVFQERYKLRSSKPGELPLSGAVVCGICGAPCIVRYNNGKSYVSCRTHGQNAVLCELRPVQAETIYHAFQRLQYNLIHHPDILSFYLKQLQVIRNRQMLWGADVISLNTKISEILSQNHTLTLLNKQGLVDPDIYITTSNQLAEQLRKAKQQKDKLLDREHINIIEQTQMLIDVLMEYPEATDAFNEELFCELIDKIIVESNTRIKFRLKNGLELPEAIERTIR

SEQ ID NO: 6739 - protein, 516 aa, unidentified
  source 1..516: note = uncultivated organism
MSQAPPKPVRCAIYTRKSTDENLELDFNSLDAQRESAEAYIESQRGEGWVCLPMRYDDAGFSGGTVDRPAFQRLLADVEAGAVDCIVVYKIDRLSRSLMDFARIMETLDRRGVSLVSVTQQFNTTTSMGRLTLNILLSFAQFEREIISERTRDKMASARRRGKWTGGPPVLGYDRLREDTGTRLVINEDEAEQVRTIFRQYLKLGSLTATLRWLDARGWVNKRYVTTKGKERGGRPISRSTLQKLLTGRLYLGKMTHKGQVYEGEHEAIVDEDLFGRVQGLLARNRNSGGTYQRNKYNALLKGLVRCKHCGCAMTHHFASRGRRRYRYYVCQRAQKMGWASCPYPSLPAGELEEFVFERIRETTRDARLLGEVVGRARSDIDRQVEDLRQKRGRHERQARRLNEDLCELAKVPDAPGVAAEMASLQDDIVEVEKRIVEVNRQMADLEARRVGEDEVVGAFEAFEPMWDRLRLAEKGRIIHLLVQCIEYDGEADEIAITYHPVGLETLSEMEAACDG

SEQ ID NO: 6740 - protein, 525 aa, unidentified
  source 1..525: note = uncultivated organism
MNVVIYARYSSLRQNDTSIEAQLKECYEFCKRNGYIVIGEYIDKAKSARTDDRPDFLRMMEDSKKKEFERIIVYQLDRFARNKYDSAINKARLKKLGIRVLSVKENITDDANGQLIEGIFETMAEFYSNDLSQKVKRNMKLNAEKGLFNGGYAPLGYKVVDVDFGTYTKKKLVVDTKTAPIVKEIFEMRATGTKILDIVDYLNNKGYKTIQGTAFKKNSLQQILKNKRYIGTSIYSGLEFENTIEAIIEKDLFEQVQEILKNNKRAPAKAKAKEEYILTGKLFCGHCKEALTGTCGTSQTGKVYYYYTCNGIKKKICTRKKVQKHYIEDIVINKCRELLTDKNITTLVEKIYEICNKDNAQTCLVKELLKEKKRLEEKINNLIIALENGQNIDMINNRLTQQRQELKLVKERILNEEKKLTNVSKVHIKYFLLQLKNGNINDFKYRKTLVNVFINKIYLYDNKLTIIFNIGEQQITVNDILLDEIETNLKEPPSLVLENKGQPKYKASTFSRCFFIANFRNLISA

SEQ ID NO: 6741 - protein, 558 aa, unidentified
  source 1..558: note = uncultivated organism
MDGENKKLKVAIYCRVSTTEQAEEGYSIGEQERLLIEYCEKQDYEVFKTYADKGISGKDIKHRPAMQEMLEDATKKKFNMVISWKINRISRKLADAIKIVDILEQHGITYRSYSEPFETHTPAGKMQFQMMALIGEFERSTIAQNVKMGMCAKARSGEWCGGVPPLGYKWVLMEGTEHSARKKSRLAIDETEAETVRLIYELYASGKGYKAIVNQINKEGYKTKLGNQFSVAQIRTILTNPVYIGKVRYNVRRDWNEKRRHNINPEPIVVDGIHDPIIEQELWERVQNMMSQKSGKPSRIYDGEYPLTGILRCPECGAGMVISRTTNKLKDGTKKRITYYACGAWKNKGTAVCHSNMIRVEKANAVVFRELEKLFNNEYFLKSVLKKVNDNSQKTKRTASKDLKFCEKELKACESRKDSLFRAYENDLITSEEFTERKELLNTEERRIRIRKTEAENILTQEHRNEISYDVIKDILQSFSQVLKDENIERGLKKQLLHMLISEIQIDRRREIEAIHLQLTDTLIQLLQNTEGTSIKGVPSNYMLSKLGIAAMDLKLVI

SEQ ID NO: 6742 - protein, 565 aa, unidentified
  source 1..565: note = uncultivated organism
MRCAIYTRVSTDEQARSEYSSLDRQREVCAAYVDIHREKGWHLVQVYEDGGYSGKDLNRPGLQELVQDLSEGKIDAIVTYKIDRISRSLKDFYDFWEVLKDHNVTFASATQHFDTSDSSGMLMLNILLSFAQFEREVTRERTLSKMAGRAEKGLWNGGYVPIGFDYAADTQELRPSEQEAPIVSFLFQRITETKSPSLVAKEANSRGYRTKRRSIVTRDGTSKSVGGNRFDEDTVKAIIQNPLYKGFIRYDGKLFPGNHLPLVEPETWDAANRACGRMRDDDGVRFKDDHIHLLKGIAKCGVCGTAMTPYPAGKKDKAGKPYLYYACTSVTQDGSASTCSVRSVPAREFESIIKSVLIDLGSDGAVLQACVDAANREALVSVEELLERQRRNHDEIARLTTGIRRIIEIMKETDLLAPDVRAEYKQLIQEKERLSTAVEKLQMDIDRRQKKVLDVEVIRRSLVDFERLVNLLPVQDQKELFQLLLREVKVHPFDPERESPPDGAAGALATKVRSKWYRVEITLHQLPGVILGERFRGGSSDKKGSGSPAGIRTPNLSVNSRTLYR

SEQ ID NO: 6743 - protein, 527 aa, unidentified
  source 1..527: note = uncultivated organism
MTESGKESARALRCAIYTRKSTEEGLEQAFNTLQAQREAAEAYIQSQKQAGWVAVAERYDDGGFSGASLERPALQQLLAAIDAGAIDCVVVYKVDRLSRSLLDFARLMERFDRRGVSFVSVTQDFNTTTSLGRLTLNILLSFAQFEREIISERTRDKLSAARRKGKWIGGWPVLGYDVDPKGGRLVVNAKEAAQVRDMYEIAANNESLEAALRAIHARGFQTKSWKTRAGRRHAARPFSRVTLRLLLSNVLYTGAVDHKGTVYPGEHDRIVEQELWECVTTELSARSTDQRGRPHRSQTAPLRDILLCAACGSAMSPSYTTKNGRRHRYYVCPGSEKRANHACSQRPVAAIDVEASILKNLEPVLGAGFNWTTVRSAVQQVHYESTSQKVVIDLKAGTQLKYEMNVANRIQSNEGDQGPDAGRVPRVSRLLALAIKFERSMKEGAIGNYGDIAAAGHISRARTSQIMRLTELAPSIQEEILFLPKILEGADRITEKALRGVARVLNWDEQKQRFEALKSSDVSRRSL

SEQ ID NO: 6744 - protein, 544 aa, unidentified
  source 1..544: note = uncultivated organism
MVAIYSRKSKYTGVGDSIENQIQLCKEHAVKFLNITENDIAIYEDEGFSGGNMKRPEFQRLLKDIKAKKIKTLVCYRLDRISRNVADFSSILEMLVQNKVDFISIRESFDTSTPMGKAMIYISSVFAQLERETIAERIRDNMYELAKTGRWLGGASPLGFVSKQINFIDEDGKNRKYNVLDTEQHEKEIVQLIFSEFVKQGSLTKLQKFTYTHGLKSRNGKDFHINCLRTLLANPVYCVADKEVYDYLTNKGIEIFSPKSDFNGSYGLACYNKTSKDHNKITRPKDYSEWIIAVAKHEGMIPSSDWIKAQNILDNNKNKAIRQIRNPKALLSGLLYCKHCGSHLRPKYDTVCKNPEVDDRRYYYICEMKERSKKTRCNVCNVNGNYLDKVFLNQLHHMTLAHFDFKEVFAVDPIDLKSDETNQNDILLSNLNGKLQEVDNAISSLISNLSQGNYEKSVVDVIMSQINELTEKKQETQKEINELNAQRTDHAEDIQATLEMKNTLFTIMTAFDSLSVFEQRDKLKIIIDKILWDGESIDILLQGD

SEQ ID NO: 6745 - protein, 507 aa, unidentified
  source 1..507: note = uncultivated organism
MKKKPAPAPDAPCRCAIYTRKSTTHGLDQEFNSLDAQREACAAYIKRQPNWTLVDEHYDDGGFTGANIERPAFQRLMADVEAGKLDVVVVYKVDRLSRSLLDFAKVMERLDKAHASFVSVTQNFSTADAMGRLTMNLLASFAEFEREMISERTRDKIAATRHKGLWTGGPRPLGYRVENKKLIIDDVEAPVVREAFELFLAHGRMSTVASIMNERGRFPRKSKRKDKQSKWSKDTMAKLLRNPIYGGVIAYFDERHAGEHQPIIDKATFERAQHLLKSRSRNLKFHGLNFDYVLRGLLKCGKCRRPMIPASSRKGRQVYRYYKCSNRDKHGRNECDASPLAAGAIETYVIERIAEAADSKNLRREIEQAMLKRLKTKEAEFATVKARAPQLVAMHSARASKLVDELTQLEGRARDVAAENLSATTEELAAAERSLAEAERGEREVRAAMEEFGPVLDSLKNFAEVWAVMTPANRVRFMGALIEEVVVDDKKGEVSISMVDFESVVAA

SEQ ID NO: 6746 - protein, 512 aa, unidentified
  source 1..512: note = uncultivated organism
MRLLPCIRLSVLDDQSTSPERQFEKIETFARIGDHELVPITEADYDLDVSGSVSPFDRPGLGPWLKDDRIGMWDAICVAKLDRLTRSLFDFVTLVSWLEARGKTLVCLDPVLDLSTPEGLAFASVTIAFAQFERETIAARVRDAYDKLVRDGQYAGGQVPFGYRPVKLARGWGYEPDPEYKPIVAEMFDRYVGYESLGSITRWLNETGVQTPWNATRKRNGKSLKDAMWKTTSVRKILASPAVLGATVTTSGELVRDKDGVVIYRANELVTRDVFERVQARLRANPVSAKVNTWPLTQVVFCADCGAPLYGSTARYGGKTYMYYCCVHSLRRDGLCTARRVKADDLETAMSHGLLALVGEFELTETRLIPRRDYSEDIAQVADQIGHLFSQIQVEALSGQDVREKQATLQRAQGELARLHALKPVECIEPVKMGLTFRRKWETLDASGRNEFLRGAKVRAVVSRDELPRVDHQEGPLTLLDTPRVAVINKPGLHVVINLGSLGGMLSLASAA

SEQ ID NO: 6747 - protein, 565 aa, unidentified
  source 1..565: note = uncultivated organism
MSAFFASSTASHGQIWDVDIYVRASREDGDKEQSETISNQITMLTDFVHGRPELRLHEIRKDDGISGVTFDRPGFHAVMDDVRSGAANCVVVKDLSRFGRDYIETGKYLEEIFPFMGVRFIAVNDNYDSMAERSAADDVVLPFKNLVNDTYAKDISIKVRSSKAVKRRNGDFVGPFAAYGYCKDPENKNQLIIDEGAAETVRQIFSWKLDGMSAQAIADQLNSKGVLSPMEYKQSIGLNFKTSFKLNKMAKWTAVAVLRILKNELYMGTMVQGRETTPNYKVKTRIYQPPEKWSRIANAHEPIISPMIFARVQYCLSLDTRSAPHSKQVYLFSGLLVCADCGQPMIRHPVQRKGKEYIYYVCSSAKCGKKCENHNIREDYLKESVLVSIQARIRSVIDLENLVRYVDALPLQQREIIRLQAQLAQKQEEAERYKRLFRSLYERLSEGILTQNEFLEFKAVYAHRCDEAERAAGALQREIKAATAGTSGTFRWIEDFREHRNLTKLTRKVVVMLIKQIKVYKDQRIHIQFYQENECRCLAERIMSAADGQPAADYRKGDKDGEDQP

SEQ ID NO: 6748 - protein, 507 aa, unidentified
  source 1..507: note = uncultivated organism
MEKYDAIYGRQSVDREDSISIESQIEYCQYETRGGKYKTFTDKGYSGKNTDRPQFQEMLEAIRRGEVSRVICYKLDRISRSILDFATMMAEFQEYGVEFVSCTEKFDTSSPMGRAMLNICIVFAQLERETIQMRVYDAYVSRSRKGFYMGGRIPYGYKKEPHYIDGKKTSHYVPIPEEAEVVRLIFSMYAQPQTSYGDIVRYLLENGITNSRAKNGVWDRCRIAEMIKNPVYVRADLDVYRFYKDQGTNLYNSPEDFIGHFGCYLFSEKGAGRKQCHLEGQHIVLAPHEGIVPADIWLKARIKCLNNKQVTKPLKASNTWLAGKIKCGKCGYALTIRKCKLKTKTLRYFICSRRMQTNRCDGVGGILADDFEAFLLQEMKDHVKQFETLSAPLQAAENPRVHELNIKIEQTSAEISSLVDKVTSANDVLMDYINRRVKELDAQITAYREEISELSPLQNKKQCDIEQIRNYMDKWDMLDFDDKRAVVDQLITVIKATQDSVEITWKI

SEQ ID NO: 6749 - protein, 587 aa, unidentified
  source 1..587: note = uncultivated organism
MNTESRAVIRCAIYTRKSSEEGLEQSFNSLDAQREACEAFIASQRQERWRLLAARYDDGGFSGGTLERPALKRLLKDVEVGRVDTIVVYKVDRLTRSLSDFAKIVEALDARGVSFVSVTQQFNTTTSMGRLTLNVLLSFAQFEREVTGERIRDKIAASKRKGMWMGGTVPLGYDLKERKLIVNPEEAKLVRRLFNLYLELEGVSKLKARLDREGTKSKTRISAAGKRSGGSSYSRGALYDILQNRIYLGEIHHRGQNYPGEHDAIVPRELWERVQTQLRTDNQGRRNGLKANSPSLLVGLLQDSEGNRFTPSHTSKNSRRYRYYVCQTTTDGCKAPGKPARLPAHEVERQVSLRLQSFLHSGKDVMDELSQTEDSPARTQQLMAAAVKRSDQWRSASPAAVQEFVREVVRRGVVHPDRIEVEVSKRRLCAALTGDHRGSSPRPVPDHQEEGLGDVIRLELEVRIKRCGGEMRLVLPPDLAGQARPHPVASLLKALARGRQWYEWVVAGEVSGRRSIAQKLGLDERYVGRVLECAFLAPDIVEAILVGRQPSDLTFRRLTRHLSLSWVEQRRQLGFPPQTPTAADRLS

SEQ ID NO: 6750 - protein, 576 aa, unidentified
  source 1..576: note = uncultivated organism
MKRSKKAKKSEPLRIAAYVRVSTLRQVAEGDSLEAQQNDITKYIEHKKTLHGWLVKSVEFYVDAGRSAKDQKRPELQRLKRDIAQNRIDVVLCFKLDRITRSLLDFVDLWDLFEKHEVQAISLREDFDTSTPMGQAVLKLIMVFAELERNLTAERTIATMRDRVERGLHNGGLKYGYVSDPKEPGRLVVDPEWAPIIQNDFFNAFEDLGSVGAVLRRLDSKGIRTPERQSRSGRIIGGKRFKKNQVVRILRNPIYIGRVKWGEVWTDNAHEAIISAAQFDRVQRKLDENTQHRRNHRYTRGRCYLLRSLIRCSCGAVMTPKGAIGRNGKYHYYTCTRQGHEGVKTECSAPAIPAEALEQAVMDRVVALGSQDQDREKIIREALRSIDENVQSIGSEAEGVRHRLTTVQTEIQNLVGGLKRVGEAGLVSVQEEITKLEAERGQLRERLVQLANQEAPLAASVLMAQKFAKTWQSVGELLRQATPDEQRIILQHYIEAVELKFDDQEGKIGRYVLKLFPEVQPLDQPPPENRNGLSIGGGGEGQLLTDLGSVRQSDQTAPRLGLEPRTQRLTAACSTD

SEQ ID NO: 6751 - protein, 546 aa, unidentified
  source 1..546: note = uncultivated organism
MKCAIYARVSSEKQEQEGTIKSQITALRDFGSKNNFEIVDEYLDDGYSGELLARPQLDRLRDDADRGKFEKVLILHPDRLSRKYAYQVLIMEEFKKKNIEVEFVNHKIGDNPEDELLLQVQGAVAEYEKTKILERSRRGKLAQAKSGRIIGNIAPYGYSYEKGQAKTTRGYTINEEEARVVKTIFSLYLELGSLSRVSKGLKDLGIPPRKNGEAWRHSSLYRILRDETYIGTTYYGKHRSVEKEGNGGYKRTKKSGREWRDKKDWLPIEVKPIIDKTIFENTQRLLQKRFRPFGVARLRYMLGGLLKCANCGHTFTGENGHGFRYYRCSNRLRRHPLPKNCDARMINADRLEEAVWKVMSGIITKPSLLIKCAGLRGEKEEMRRNEEQGFFRELKMMEEKLDKEIARRDRLVEVYRDGDIGKEAYKIKMEQSHNAIETIKRDKAEKDKILQQSKNIPLLKEVIYKFSDLMKSKMSNLTYDQKQLVLRLLIDRIIVDSNNKSIVIKGVIPTREPEKVVGELFSRVSGLLQLNPSGSLPYLPKKAKAG

SEQ ID NO: 6752 - protein, 514 aa, unidentified
  source 1..514: note = uncultivated organism
MPQVQIIEPTIRPQKQKIRVCAYARVSSNSDDQLNSFSAQVEYFTQLIQAHSDWEFIDIYADEGITGTRADKRDDFQRMMRDCRAGRIDRILVKSISRFGRNSADCIEAVRELKILGIAVAFEKEGIDTGRMTNEMYFSMYSAFSQEESTSIAKNMRKGAVMRMKNGTYRLSQAPYGYRLDEKGGLLIHPEEAKVVRKIFGDFLSGKSIREIANELAQAQVPKLKGNPVWSATGVSYILTNERYMGDELFQKRFTTDAFPFRKVKNRGEKSQFYAEDTHEAIVSPNVFRLAQELLKKKNQLHGRKKEIQTYTFTKMLERSECGSTFCRRVTKAGTVVWACYRHFRDKKLCAIENVQESEVESAFVTLYNKLGRNRSEILTSFITQVEKLRDKNFMSHPGAMQLNKEIADLLEQNHALATLRAKECIDSAFYMSETNTNNTKLENLRKELQRYRDLNDYHEILDGSRLLLKIFEEQESILEFEPVAFRNMVIKVRIFSDTICFRLINGMELAERR

SEQ ID NO: 6753 - protein, 521 aa, unidentified
  source 1..521: note = uncultivated organism
MRREKAIDPDKVAIYIRWSTDDQGDGTTLEVQLEGCRHYVLSQGWILNEDLIFVDDGWSGGTLERPAMARLRGMVKAGQIDCVVVFKLDRLSRSVIDMVNLVLEEWDGLTHVKSAREAVDTSSAMGKQFFYMLVSFAEWERSVIRERTTSGRQARAKEGYKASSKAPFGYRHGERTGSYEVDEAEAPILQQIFQLYAQGVGAKSIVVKFNTEGIRFRGGGLWNERTVLAILSNPVYIGTSVYGRITRNPRHGKAEGETYWVKNEQVTVVDNSPFIPPLVEEELFALAQQIKAGRRFKTMPKEMPSPRAIASPYLVTGLAKCRCGHSLYARVSPRDGKLYEYYACMGKKTKGPVYCSARNIPREALDKAVEREILARYGDRIARKRFKEAVTANVEREKREVATALAQVEQRIAKVEAQERQVRIDYREQVITASEFRSVRKDLLDELQALRSNRQEHLATQARLQQQTVALSAQLKAVENLNQWASLAPEQQKRLLPFFLQSLHVWMRDRARLEIQAVWTG

SEQ ID NO: 6754 - protein, 577 aa, unidentified
  source 1..577: note = uncultivated organism
MQKLNDKLYHAAIYLRLSQEDGDISVSDKNESNSISTQRDLIHAYLQKQPDIIYVTEFCDDGYTGTNFDRPGFEKMMTAVREKKVDCIVVKDLSRFGRDYIESGKYIQKIFPMLGIRFIAINDGYDSADTGNQSNDFVLPFKNLINDSYCRDISIKSRSNMEVKRRNGEFVNNFAVFGYMRSPDDKHKLVVDEDAAVIVRNIFNWKQEGWNAQQIANHLNKLHVPSPMVYKKKCGQNYRTSFKTKTTAEWSAVAVLRILKNPVYTGVLEQGKTTTPNYKVKTKVVKDESKWARVENAHEAIITPAQFELIQTVLGMDTCRAESNDEIYPFSGMIYCADCQSPMIHRAATSHGKKYHYYVCSGNKKDKNSCTTHNIKCDLVEEAVLATVQAHISMAIDIDNAMSQVDSLDWEQREVRKINAQISAMELDVEKFSRIKLELYEDLKGGLISKEEYYSFKEDYDVRINSIKQQISNLVSQRNAIEGGLTSAQGWFAQFRKYENIEKLTRLAIVSLIERVEINDNKDIHVKFRHADQFAAALEYLEMRKQPQCKIILMKEAGWNGKNIPQTAKPVAQSVVF

SEQ ID NO: 6755 - protein, 552 aa, unidentified
  source 1..552: note = uncultivated organism
MTKLTLRCAIYTRKSSEEGLEQGFNSLDAQREACEAFVLSQQHEGWKLAPTFYDDGGYSGGNMERPALKQLLADIDQKKINVVVVYKVDRLTRSLADFAKIVEQFDAKGISFVSVTQQFNTTSSMGRLTLNVLLSFAQFEREVTGERIRDKIAASKAKGMWMGGTPPIGYKACERTLAIDEEGAGKVRHIYERYLLLSNVRLLTEELARQAIKTPLRISLTEQIHGGKPFWRGQIYRILTNPVYIGQIVHHDKVYEGDHPPIITLEQWHQVQKCIAHNRQGHRVRQSAPSDSLLVGLILDEQGHRLIASHSQKYSKRYRYYISETLNTSIRSDALTGIRIPAPELEMLVIQEIASWLGDESTVLTYLDPPAHQVQELTRAIHNHYELLKQDGVERYQFMHQLIDRVCVLPNQVHITIKPNVLLKSLAIPAEPLTLIAHTQIERCGMAMRLLVGNKRVNPTLDTNLIQTIRNGQDWLERLTSGKAKSLGELASQLGLTTTAVTNMVYRAFLAPDIIRAIMNGTQPAHLTGDFLKRQGPLPLDWEEQRQLLGLK

SEQ ID NO: 6756 - protein, 536 aa, unidentified
  source 1..536: note = uncultivated organism
MKRTVAIYARVSTEHEAQLSALENQVQYYDEIISRHPDWTLYDKYIDEGITGTSIKKRKNFMRMMKDAQEGKFDLIITREVSRFARNTVDTLQETRKLKKIGVEVYFTEDNIWTFKDDDGELKLTIMATLAQNESKKTSQRVKAGLRIAFTNGIYMGSGNILGYNKIDKNTMVVNEDQAEIIRYIFKEYNNGVGTTTIARNLKKRGCKTSTGLDRWSASYITHVLRNQFYAGTIVYNKQYIPDYLEQKARKNRGEVEQIVVEGTHEPIITQEEFEKAQARLDRHSKPKPNGDRTPIGVPKTVWSKKMICECGSTFNRRKYHDSKKGRTFCFECYNRKTHPKGNYYEYGYKFCEVKDVPEWKLKDMAHFIFRSLTQDDNNRAELEKILMNGIKIDTYEVDEINKEIERYNKLISDNTIKLDRLLNVYLEKLVNPSEYESMHRELSDKIELYKLEKEDLEKRLKRLDPPELKLERAKQSVRRLLDFNYNGIDDKLIEEVVEKIVVHKDWFEWKLIFVEEPFKLKVRGNLKDHFVEEYK

SEQ ID NO: 6757 - protein, 539 aa, unidentified
  source 1..539: note = uncultivated organism
MSDKPKKLRCAIYTRKSTEDGLEQDFNSLDAQREACAAYILSQASEGWDAVSELYDDGGWSGGTMNRPAITQLLDDVKAGKVDVIVVYKVDRLTRSLADFAKIVEILDENEASFVSVTQSFNTTTSMGRLTLNVLLSFAQFEREVTGERIRDKIAASKKKGMWMGGPVPIGYDLDERRLVINHAEAKAVRHMFRRYTILKSVPQLVEELAADGYRTKPRLYKGERIVGNIPFRAGSLTKLLHNPVYIGKVRHKDTIYDGEHEAIIAQALFDEVQSIFATNRRDNALGKKSENPSLLTGLIADPEGRPMSPSQARKGARLYRYYTTRLEPGEKKNTVWRMPCGEIERIVMNAIAGELASLPSADGKDAETLAGLIGKNDQLVADLPSMSISDKRKLLLELDVKVQVTADTVVIDLLLNDHDARHKFSVDAKLVSKGIERKLAIAPDQGSATCEADPIMLRLISHAFAARDHLVHNIPQPMVADYSARHLNQLVRLSYLAPDIIAAVINGTQPPELTGRQIMRKNNIPLDWASQRIMFGFA

SEQ ID NO: 6758 - protein, 557 aa, unidentified
  source 1..557: note = uncultivated organism
MKTTLQNYNIGQGVTLKTKRAAIYIRCSSDEAGKEGYSPQTQRDKTMDFIRANNYQINERFIYTDIGCSGSTDKRPDFQRFLKDAKNKEFDVAVVYRMDRFFRNLRLLLNTVAELRDIGIEFKSVTEPFDTSTPTGRAMFANAGVFAEWMREVGLESRNEGMVKAMKEGKYLGGTPPYGCKINKETQKLEIEKNEIKVVKMIFGWLVDEGLSEYKIQQRLNTMKVPTKFDLVGRKKKTGSTCWWNRKTVDRVLSNEVYTGTFYYRKYLHPGRTRNENNFRPKEDWIKVEDKSLMVISRERFERGQKQLKKNKEQAARNTKELYALQHKIVCGVDGYRYQCGIRRYQSTKTGNKRSTKYYFCVGTRSYMAARRCHVPTISESRIIPPVWNKLKEIFLNPEIVLKEIETCKNQNAGSSVSDRLEIVKKELASQEEKKERYAELYAEKSINKNFYDKKIKECTDKAEKMQEEGIRLGRLATSEDEKKTQLMSIIELYGRLKNGLENATYELKREILQDLVERVVKTDNKLEIEFLIPLLGERDQENQSGCSDNPRMDRNI

SEQ ID NO: 6759 - protein, 570 aa, unidentified
  source 1..570: note = uncultivated organism
MNTNLNIDLYNADIYVRLSKEDGDKEESDSITNQKELILEYLKSRPDIRIHGIRVDDGYSGVNFERPAFQQMLEDIKNGTVNCVITKDLSRFGRNHIEVGKYLEKIFPYLGVRFIAINDNYDSNENADQGNSVIIPFKNLINDAYCRDISMKIRSNLEVKRKRGDFVGAFAPYGYQKSEDNKNKLEVDEDAAEIVRDIFRLYLKGYNAYKIADALNQRAIPTPMDYKRDKGSTFYTGFKKNMRSEWTHVTVLRILSNPVYVGVMVQGKNTTPNYKIKKRVKRDESQWNRVENMHKPIISSIDYKNVQDLMRIDTRRSQSEERVYNLSGMVRCGDCGANMVRKTVPSGRKKFVYYVCGGHKKDKRTCSSHSINAAALEESVLTLLNHQIQIVADMEEILDTLEEKERKRTGVEKKKQQIAQKKEEIQKFTALKLELYGDFKEKILTKEEYLELKQLYEKRIHTVEKALSILNEEMERLASNQGHFSDWICEFAKFGKLEQLSREIVVSLIDKILVYEKQGGESYPRVEVIFKYAAEISEATEIIGDLQESAGDIITEGRQNINGKKKQKTN

SEQ ID NO: 6760 - protein, 511 aa, unidentified
  source 1..511: note = uncultivated organism
MAQVQIIQPYQPHSEELEKVAAYCRVSTDSKDQLNSYRTQIGYYTNFIAQHPGWELADIYADEGITGTSLEKRDEFRRMLSDCRAGKITRILVKSVSRFARNTLELIETTRELKDLGVVVVFEEQGIDTAQMLGEMQLTLLAMAAQEESTSISKNMKWSIQKRMDAGTYLGNTAPYGYRLEDGQLKIEETEAAVVRRIFEMRLSGMGQVAITQELNRQGIHPRDGKPWTVYRVRYILSNERYIGDSLFQKKYIADPLSHKSVRNHGERDQYYIHDTHEAIISRENFQKVQESFQNQSPRRSKTPHLFVHRILCPQCGCHYRYIRSSGKPYWGHASQSEIEPSCKDIRLPEESIQAAFVNLLGKLHTHSDAILSPTLSLLEEIAARQERGNAKLYELNTALADLNEKTHTLQRLHNKGFIEDADFREQSDALASQRKKLSDQRPQAIHGSKALETLDKLRELQRQLDTLPEFPWEFDIDQFDQLVEKIVPLSKTELLFKLKCGLEFKEVLCQ

SEQ ID NO: 6761 - protein, 562 aa, unidentified
  source 1..562: note = uncultivated organism
MTKVRCAIYTRKSSDEGLDQDFNSLDAQFEACAAYIKSQASEGWTLARERYDDGGVSGGTLDRSGLMQLLGDIAAGHIDIVVVYKVDRLTRSLLDFAKLVEAFDKAGVSFVSVTQSFNTTTSMGRLTLNMLLSFAQFEREVTAERIRDKIAQSKARGMWMGGTPPIGYRPDGRSLAIVESDAAVVRQIFKRYVELQNVRLLAEELEQEDLPSPRRETSTGRSFGGCPFTRGQLYKMLSNELYIGRIPHGGLSHPAKHLPIIDRETWNAVQAGLAANINGMRKGAGPESSLLAGKIVDDRGVPMLSVHACKGKVRYRYYVSRDLHLSGDSSNSEGWRLPAREIEPLVRSKVAEVLSDPVELLVRSGAELPSPHEFNAVVTRGKALTQTLNGPRAPAARLLRALVGEVRISPTKVLVLIDAANLARHLQISCRSESLQLEVNAALKRSGTAMRLINHNGTRTLPAVDQTLIKAILQARSWWGELQADAKITLTDIAKREGITSGYVVRIVRLAFLSPAMLKAIVEGAAPAHLNLKRLLEPGAIPILWDNKFAGDSLPASPSSIH

SEQ ID NO: 6762 - protein, 542 aa, unidentified
  source 1..542: note = uncultivated organism
MIISFRTARACASQNCPSEGKHIKWKQKGGRSMEQYLMYLRKSRMDTDYEEISVSETLQRHRRILESYCRDKKLNVVQVFEEVVSGEALSSRPQMLRLLELINTGLYAGVVCIDIERLSRGSSMESGYIMQILQTNGCKIITPSKVYDLQNESDEQFTDMKFMFSRYELKTITKRLVRGRNQSASEGKFMGSVAPYGYKAYKLQGEKGNSLEIIPEEAEIVRLIFDMYGKQGIGYNTIAYRLNQLGIPSQSSAWGQTSITNILNNEVYLGKIRWRREPVKRVVTDGMLEKKRILNKNYDLYEGRHEPIITQQQWDDVKDQQHRRQKTCLNIERQLANPFASIMHCGKCGAVMKRNVPGRSQNTRPWYRCPTRGCNCRAIKCDDAENAILDAMKDWLEDYTVRLEQNGITEDDSAAKELDAVRNKLKQLADQQSHVCEFLEKGIYSVSMFTSRNEAISKEITRLNHAEEMLLKEIDSQSTQTDAALAIIPTTQNILEQYPELTIPEKNRLWKLVLKDVTVYRKPTGEIELHVYPNIPKIEITA

SEQ ID NO: 6763 - protein, 527 aa, unidentified
  source 1..527: note = uncultivated organism
MNTDGYKVGIYLRLSREDERLGESGSISTQRDLLLNYIRDNNLIFVDEYVDDGVSGTTFDRAGFNRMIKDCESKKINMIITKDTSRLGRDHIEFGFYVERYFPEHGIRYVAVNDGIDTFSNSSANDMLVFKSAFNDMYVKDISNKQRSSLYTKKRNGQFVGAYAPYGYNKSDEDKHKLVINEEEAKIVKRIFNMFARGDSLTTICDKLTNENIPTPSMSKGMNIGQNNYHYGVWSTRTVGDILKSPNYIGNLTQSKQKKVSYKSKKRVHNKKDNWIIVENAIPRIIDDELYELVQNMFSSNKNRIKGNGITDSLLLRGLIYCKECGHTFGFRAQYQNTKKHGRVCRIYGNCNYWAKRKNQGVCTPHSVKYYEIEEAVVSELKNLCNKYIDSNSLEDSYKKESKLNAKKDKYNIEILKLQNSNKVLNKKIDDCYNDKLDGNITLDMYKRAYNNFVNQIQDNDNKIREYEREIYNIENNKLDNDKSLMERIEKFLSMDDPNRNLIASLIDRIEITEDNNIDIYYKFKLV

SEQ ID NO: 6764 - protein, 547 aa, unidentified
  source 1..547: note = uncultivated organism
MKVAIYLRVSTEDQVREGYSLEVQEEYLRGYATRESHQVYSMYKDGGISGYTKERPALIRLLRDAKDNKFDLVIVYKLDRFSRNLKDLLNIVDELLSYGVGFKSATEPFDTTNSAGKLMFQQLGSFAEFERNRIKERVFPGMVKGAKNGNWQGARFAPYGYNYDKEKKLLQIVPEQAKIVKAIYSMYLMGKTTSEITAHMYHKGYRTRTGIRFHSKLICDILKNKVYTGKIVWNRRHYSKKEKTKGGYGKGYRYLPGDANDTVEAQGRHTPIISDEDFKRVQLRLANNRKAIRRIFNKYEHLLTGILKCGLCGYSYLGMTNVSNHKTKERKKWYRCRLKGETRGIECNNKNIPAASYDEFAFAVLEKVATHKVVKERRYAELLKVAGDPSDEIINSFHNVKQALNENYEKQKKLTSIYLEGGIGQEIFKETQEPLKDKEDKLKRKIRSLEMKLIEKEASEAYNNLLTSVLSNPAGARTNLTIFEKKALLRLVFKKIVVREGVIMEVELYEPFKTLLPKEDIECLLSQVKTKTRAKDVVCTYARSDVK

SEQ ID NO: 6765 - protein, 521 aa, unidentified
  source 1..521: note = uncultivated organism
MNIRKIEAQKQEVKKLRVAAYCRVSTDSDDQRGSLETQKQHFEAWIRLHSDWEYAGVFCDFGITGRKAEVRDGLQALLYECRIGRIDYVLTKSVSRFARNTVDCLSIVRELLSYGIPIYFEKENLDTGSMESELILSIISSLAQDESESISKNVKWSAQKRMENGSYKIGCVPYGYTKNEDGDMVIVPEEADVIQYIFNSIVSGMGVYKIAKNLNVRHIPARKGGKWSTTTLLDILVNEKYVGDALFQKTYTDSNFHRHDNHGEIKTHLVQEHHEPIISRELFEKAGAILAQRAKERGIQKGTAKYQQRYAFSGKIICGQCGDKFKRQTYTSGITWACKTHLFHKSECSMKYIRDDAVKAAFVTMMNKLIFARKLMLRPLCEALRIAGSDENLQRILYLKEELQHNAERKDELRKLRARGIIDSVLYNQEVSRIEKQSDDYRSEIRGLGNAESGSSLKEAERLLKYVESADMLSEFSDDLFTDFVENIMVYDRSHIGFQLKCGLTLKEELCTGIESKMESP

SEQ ID NO: 6766 - protein, 573 aa, unidentified
  source 1..573: note = uncultivated organism
MAKTKIHDRRPVLSGADKKILRCAIYTRVSTFDQSRKDYSSLDTQRDVCRKLLELKKMTDGWVEVGVYADTKSGETLDRPQLQAMMEDIRQGRIDVVVVYKLDRLSRSVADFCTFWEFLRDHSADFASATETFDTATSGGRFFLNMMMVFAEFERERIKERTAESRQQRAEKGEWGGGIDAFGYRNVEGKLVPDEHESQVVHRMFTDISSNVPSSDVARWLRAEGIKTRSRIQNGKTVGGKWFTTDSVKAVIRNVAHKGCIMHNGHVFPGEHRAIVSDDLWERANRVIAPRVDRRPSRIEEDKHGHLLKGILVCGHCGKSLTPHPAGKKDANGQPYLYYACTNVTKEGAKSECGVRSIPAKRIEELVVSLLGEMGKHPETIEKTVGVLRRSAQKEIGPIKAEIEAVTKQIRALQEQETRLAAIAANPATGDFGANLIREGRQLAERRKSLEQDRDRLRVQVSVKEVGLIDAHAVSQQLLAFRSLIDGMAAEEQKELVRLLLREIRVNRFDPEKQKAELGDAQIPLNIRTQWFVLNITFFANDLFSRILQTGVKQFVSHQNWLPGLGSNQRPSD

SEQ ID NO: 6767 - protein, 540 aa, unidentified
  source 1..540: note = uncultivated organism
MRIAIYVRKSKWTGRGESIENQILMCREYIEKFIEDSREAEILVYSDEGFSGKDTNRPQFQKMLEDMKQGPFQYLVCYRLDRLGRNLADLALLIEKLNREHTEFVSIKEHFDTSTPMGKAMLYFSGVLAQMEREQIGERVRDNMFLLAKSGRWLGGSTPLGFHVREKLYGEEKIRKAFYLEEEEKEAETLRLIFREFLNSHSLTKTAQRLTEKKIFTRRGRAYTPETIGEILENPVYCQSGELSYNYFASLGCRMGFPREEASEEKGLIRYGKTVSSRYRGQETPPQEWIIAQGEHRGLIFQEDFLRVQRLLEKHRLGKRGEGRIQNEISLLAGLLYCSCGSRMRPKYHGKSQVNEEGLRKFSYRCICRDKTRGQACQSVPLPGNMADSLVWKFLMERTRQEISVKEIFQEVRRKTEKEKEQEEERENIQKERLRLEQEALRLAQRLAEAKDRDLAGFLENEICRRLEEREELRKKELEKGNFLDQKERQLIVCRYSDPEFLSSFLSVPNNRIYIEIWIKKLVWEEETGKLYLFVSPGVQ

SEQ ID NO: 6768 - protein, 519 aa, unidentified
  source 1..519: note = uncultivated organism
MAANVTVIPPRAVRPDTLRVAAYCRVSSDFADQLHSYAAQIQYYTDLIQNHDGWDLVDVYADKGITGTRMDKRGDFNRLLADCRKGKIDKVLVKSISRFARNTRDCLASLRELFRLGVSVLFEKENIDTGTLTTELMVSVSSSLAQQESVSISQNQQMSYQRRMERGEFITCTAPYGYRMPDGKNLVIEESEAREVRWMFQAYLDGNSVKRIAEEMNRKEVHNSWKRGVWYERLIRKMLSNEKYVGDSLCQKTYTANTFPFVKKTNHGEVDQYYIENTHPAIISRETFDKVQNLLKKRAERRPSSRQRTPLSLKVICGNCGSVYMRRVNKSGHTTWVCRKHDRNAIDCPNGRVPETELYGAFVRMYNKLKRNTGVVLLPAIKQMEELRDVIQRGNPAMLAVNKAIAKASEQSYNISKLQTAGLLDTDACTAKFNEISAQLAKLRAERRRLLENDDIDDAIDALQETVDLVRHGPERLMEFDEGLFLSLVERIVVESQTCVRFRLQGGIELKELLKEIGR

SEQ ID NO: 6769 - protein, 531 aa, unidentified
  source 1..531: note = uncultivated organism
MPISINLAQAIAPPPPQPRVINRIEAIENKAQYQAAAYCRVSTDHEDQEGSIEVQRDHFLSIITSSPDMEYIDIYFEQGVSGTKKETRPELQRLLSDCKRGRVNLVLTKSISRFARNTSDCLEMVRSLTALGVALIFEKENIDTRYMDSEFLLTILASLAENESRSFSENNRWAIQKRFRDGTYRPAKAPFGYDLADGKYVVNPYEADKVRYIFSQYISGVGPAEIARIFNQEKILMKRDGEKWKEPRKRRWSVLSILSILKNINYVGDALCQQSYHDHDFKVKTNRGQYPQYLIENRHEPIISRDDFLCAQKLIEQHRKERSYPRNVVHHLLTGKLFCGCCGSPMKRLSRRKGATNCYSWGCKEHEERKSCEALPVLEEGVINATKTLINKLRFLAPILPDYAEALDREWREAHREEIGPLEEQLSTIKWEKTQLSLLWAHNSMEAAAYYLRKNELETDDRLAQAALGRLFCPQAEEIRRLQKAQAAISESMETFLDEFVEHITVPDRFHCVFHLRCGLCLRESVMSDIL

SEQ ID NO: 6770 - protein, 527 aa, unidentified
  source 1..527: note = uncultivated organism
MRRNGNNGPSRTSPVIRCAIYTRKSTDEGLDQEFNSLDAQREAAEAFIRSQAGEGWTVLPERYDDGGFTGGNMDRPALRRLLADIEAGRIDGVVVYKVDRLSRSLLDFARMMETFERKGVSFVSVTQQFNTATSMGRLVLNVLLSFAQFEREIISERTRDKIAATRRKGRWCGGRPILGYDLDPQGAKLVVNPDEAAQVRAIFQLYLDYERLMPVVEELRRRGWRNKRWTTRKGIERGGRMFEKNSLWRLLTNVAYLGKVRYKDEIHDGQHEAIVGEDLWRRVQTLLARNGRMGGPTVRNKFGALLKGLLHCAACGCAMTPTHTTRNRTKRYRYYVCTAAQKRGRHTCPTGSIPAGQIEQFVVDQIKCIGRDPGLVAETVRQLQAHSARWTEDLTAEQARLQRELEDYDLQLHRIVMQPSTEADIERTTARLAEVQELIAVAQRRLVEVRDRAERLRRGMIDPTGVARALAEFDPVWESLSLHEQTRLLHLLIERIEYDGRDGVISITFHPTGIQTLLDRQVEGDPS

SEQ ID NO: 6771 - protein, 546 aa, unidentified
  source 1..546: note = uncultivated organism
MKIAIYSRKSKYTGKGDSIGNQVQMCKDYIACHFPNEEHEFFEYEDEGFTGAVIDRPQFKNLMKDIETKKFDALICYRLDRISRTVDDFSSTLNLIQSYGTDFISIKEQFDTTTSMGRAMIYIASVFAQLERETIAERVRDNMMELAKNGKWSGGKLPLGYTSESTTFTDEEGNERKSVKLVPNNEELKLVKLIYDTYLKEGSLHKTEVYFTKNNIKSKSGTLLEKTSLKVILQNPIYVKSTEKVLNYLDKDGWNVYGTPDGESGILSYNKTKSIIKNGKYVKVNKDKEEWIAAVSNFPGIIDDETWIKVQEQFKDNTNLFPRLGKTNNALLTGKLRCAHCNSYMYVIHGRVSKKTGEKFYYYSCSLKKRSKGSLCSCKNIKADKIEEAVLKTLETLGGDKKVFLKSLLNNLSSNHTSELKTKKLSIEKQITDKNKILTGLLDKLALAPDISDIIMTRIKLIKDELKDLDFELNNVLRDLEFNSNEKFNLEFIDKLLSECINIKNLSKEKQKAIINILIDSILYDGETDDVHVIVHGAKGSKKKLI

SEQ ID NO: 6772 - protein, 520 aa, unidentified
  source 1..520: note = uncultivated organism
MTTKSGKELRCAIYTRKSTEHGLELEFNSLDAQREACEAYIKSQTHEGWRALPKRYDDPAYSGGNMNQPALQRLLKDIDAELIDVVVVYKIDRLTRSLADFAKLVEAFDAKKISFVAVTQQFNTTTSMGRLTLNVLLSFAQFERELSSERVRDKVAASRKKGKWTGGSVPLGYVSKDKKLVVDQNNAKTVRMIFSRYLMLRSFQKMIDELNQKGVVTNTREIKLKMSGGVPFTYGPLAYLLKNRTYLGETGHKGTWFTGEHEAIVDREIFEQVQQLLKANSLGRTGRRQQNNALLAGLIFDDRGNRMSPSFTVKRGVRYSFYVSSAILKGRKSDAGSITRVSGVDLDAAVLKALRLRVDTAIDDDAPTPQNLIDHNVSRIVVGSKTVTITLKPTADSTRPAIELPWSTPKKRERPRIEGSDDASATAPNPQLIQAIVRAHVWTRLLLDGTHKTIVSLAQSVGVNPKIVRYSIRMAFLAPDITKEILEGDQIPGIRFKEFTRTLPLSWPDQRREVIAAASA

SEQ ID NO: 6773 - protein, 539 aa, unidentified
  source 1..539: note = uncultivated organism
MNEQKRVCCLYRVSTMGQVEKDDIPMQKQSCHEFCEKNGWAIVKEYSEKGVSGFKVSAKDRDAIQEIQREALKGSFDILLVFMFDRLGRRDDETPFVVEWFVRNGIEVWSTVEGQQRFDNHVDKLMNYIRYWQASGESIKTSIRTKTRLAQIVQEGRFRGGVAPYGYRLEKQGRISKKNREVNEIVVDEYESVVVQLIFNKYINEGYGAQRLSRYLYEQGYRNRKGTNFANTTIVKMLKNTMYTGILRSGETQSEVFPHLQIVEPELYERAQAIMKGRTQKHRDVPFNSKGQSLLSGLVYCAHCGSKLVLTTSGDSRDRKNRRIRLRYCCHNKVRHPQDCDGQSGYGVPKLDSLIDSMMILLFSQVKNLSRNQVLSQQRWREMSERTAAFNQAQKLLDAKQKELDSYKSEVYKSLQGQGRFEPELLNELIAACKMEVESLTAQAEAHRAVLTDLQGESTRIQQDYDTMISWANLYVTASQERKKMILYQLIHKVEIGRDYKINVQFNISYRQYHELFFGVESAESQDANATGTFAEKLR

SEQ ID NO: 6774 - protein, 517 aa, unidentified
  source 1..517: note = uncultivated organism
MAEKHLTDGTTALAAQPRVIKIEAAEKSQNAQLRVAAYTRVSSDSDDQLNSFAAQNRYYAELISGKAEWRMVDIYADEGITGTSAAKREDFQRMMADCRRGLIDQILVKSISRFARNTKDCLEAVRELKELGVNVRFEREGIDTANVSSELITAIYAAFAQKESESISGNMRWSYQRRMESGEFNTCRAPWGFRLDGKSLAVHEEEAEIVRRIFLEYLSGRNPREIAEILNAEDTSGRIWKYKAVDYILQNERYAGNALLQKRYTTATLPKQQKINHGEREMYYVEDSNEAIIPQELFDRAKELRQRRSVGQAVTHGRLCVRMRCSCGSRIRAKQVNGRWYWCCCRHDEKGDCVIKPVPEAQTDEAFRRLYYKLKHQSLPILEQMLETLQTIRDRRMLWSEDIVSLNKKISKLSSQNQTLAFLKQNGLVDPDIFIAKSNELTRQLRQELMDAEGDATAQRTRELIALLEDGPDFLDRPDTELCGALVAEIIVESNDTLRFLLHNGLELRESIERTVR

SEQ ID NO: 6775 - protein, 589 aa, unidentified
  source 1..589: note = uncultivated organism
MKRVQPASTSVDLSPQPQGMSNNGARSAQRRLRCAIYTRKSTDEGLDQEFNSLDAQREACASFVASQTSLGWKLVPERYDDGGLSGGTMDRPALQRLLHDIRDNKIDVIVVYKIDRLTRSLADFAKMVEVFDDNETSFVSVTQQFNTTTSMGRLTLNILLSFAQFEREVTAERIRDKIAASRKKGMWMGGTVPLGYQVHDRRLVIKEPEARFVRNLFRRYLELQSVPRLARQISQEVAAVITCGQSSRLERYASNGISSGVLYGLLANPVYIGKARHKGEVYDGEHEPLIDEELFLAVQKQLADGTHRTKGRATCGNAHLLTGILFDDTGDRMAPTHGKAHGKRYRYYVSRRIRRTPDAAPDGWRIAAHEIEKVICNQAAAFLRNESLIAGWVEQCGLTNRTQLGLQRARELAQSMEEWSDTDRRREVLNLMFRSISLSTSAIRFEVNSSRIAHRLVEKTNTHDDPTSEDEPVSIEVPITLRRRANGLRIVISSPYTQPEPDQTLVDLVARAHVFLSRLTGPSAINTSRIAERFGMDRADVGRILPLAFLSPAALEAILTGRQPLSLNARQLARTELSPIWSEQEASLL

SEQ ID NO: 6776 - protein, 564 aa, unidentified
  source 1..564: note = uncultivated organism
MADKRVRCAIYTRKSSEEGLEQSFNSLDAQREACRAYILSQKHEGWTALNTRYDDGGFSGGTMERPALKQLLDDIVAGKIETVVVYKVDRLTRSLGDFSKIIEVFDSHGVSFVSVTQHFNTTTSMGRLTLNVLLSFAQFEREVTGERIRDKIAASKTRGMWMGGAVPQGYDCVERRLVVNPGEASIVRKIFREYLRLGCVSKLKNYLEQKQIRSKARVSAAGRAYGGGTYSRGALYHVLNNRIYIGEIVHRGKVHPGLHEAIVPRDLWNKVAARLEENNRAHRTEKSQSTPSLLTGKLFDSNGVRFTPTHAVKNGKRYRYYTSQTAVQKSGTKPVITRFPAQELEQFVTSRVRLLLQTPSRCIAGIKNSPIKGAVTERIEDLEKQWPKLHTSKQHEFVRNILGRVTVGQTTVWIEIDRTRLLVTLLRQSPEALCPWSGNKLGILRLTGNFQVLRRGGELRVISPNGDSFSDGKRVPSLVKAIARAHSWYKRIAAGEVTSIDELAQKSGLTRRYVRRILQFGYLSPQITEAVLTGKHRPNLTLKEFLRGVPLDWREQETRVLQQS

SEQ ID NO: 6777 - protein, 539 aa, unidentified
  source 1..539: note = uncultivated organism
MHTRAGSLNTWKCAIYLRLSREDEDVSKRGKMNSNSIENQKDYMKAFLKGRAEMEEIRYFIDDGYSGVNFDRPAFQKMMAEINAGSLNCIIVKDLSRLGRNYIETGKYIEQIFPALGIRFISINDNIDSMDKAAAVNDIIVPFKNLLNDAYCRDISIKIRSHLDIKRKNGEFTGAFPVYGYCKAKGGKQLQTDPAAAEIVKEIFQMKIAGMSQNAIANQLNEWGISSPAQHKMEQGSGYKSAFQTHATASWSAVTLNRILSNEVYTGCLIQGKETTPNYKIKTRYKKPEREWIRIENAHAAIITPADFELVQELMKRDTRMKNGRNEISLYSGYLFCADCGCSMVRKTVPEGEEKYIYYICSGNKKDKNFCRSHRIPEKDLNDAVMKTIQIHIRYLPDWKNAGTHLKHVPEREKNAAAIDRLVQDHKLNIDKYNRLKLESYKDMKEGILTNQEFILFQSEMDKRCMDMQNAITGLEHKRAILLECKQEKIMRMDQFLIHGNIPEMTRSLIVRLIDRIYIFEKCRIEIVFRYQDTWVNNL

SEQ ID NO: 6778 - protein, 662 aa, unidentified
  source 1..662: note = uncultivated organism
MNNNKFNSNSIMSSVPLQKIRCAIYTRKSNEKGLELEYNSIEYQYDACLDYIREHQKDGWIVVNRRYDDGGFSGGTLKRPAMHNLIDDIELGLIDKVVIYKLDRISRRNIDYYKLDEVLTRRNVDVEIVTQHFDKNTSMGRFSFNMMLSYAQLEREMSSDRVTDKKRKQQSMGMWTGGTIPLGYDVVNKKLLINVAESKIVKTIFNTFIETKSINETLNVLNELGYKTKIYKLKNNDCTNDNNNSIVRGGNNFNRGSLYHILNNKLYIGKIENKIINKVFDGLHEAIIDENTFNKVQDIFKENINIKKYNKTDINYNLDSNNCNLLNATNTIKNYYPKKDSKMPYLLKGLMKCTCCNSILTPVFTTKKKSGIVYRYYRSNKAMKHSACCSIGNIPANNIENIVLNQIYSILRSPSIVLGVIDKIKNNASDFVNQDLILPINLKENDIIKYLKNIEVVWDELFPKEQVKIVRTIIKQIFVSEDNLKIIFNNNGILKLLADAGQLDIDLINRINSLENTSNINSLNPLNLDYEVNIPVDFRHKAGRSFITTPDGKDVSFVQVENRRCSPQNDYDNNLVLNLIQAENWMDELTRKKDMNISTIAIRENKKVSYICKILNLVFLAPDIKKAILNNNLKLGLTLLDLYGCKNLDWASQRKKLGIISY

SEQ ID NO: 6779 - protein, 532 aa, unidentified
  source 1..532: note = uncultivated organism
MPYAANTPLRVAAYCRVSTDKEDQRNSLAAQQAFFLRYIEEHPGWVLVGVFADEGLSGTSVKRRPQFTGMIQQAMAGEIDLILTKEVSRFARNTVDTLQITRQLKANGVGVLFLNDGIDTRDNDGEFRLAIMASVAQEESRKVSERTRWGQLQAMRRGVVFGNNSIYGYTLRGGQLTVEPEQAEVVRRVYHKFLVERKGTHTIARELTRSGIPPPMRPAGPWSSTMVLRILRNEKYCGDLLQKKYRTTDHLSHRKILNDGLEEQFCIRDHHEAIISREDFQAVQDELKRRAGMPAEKGRFSARYWYSGKVRCGSCGKSFTLKRTRRTNGTEYTRFVCRGRLDGTGTCRMRAVHGEVIRTVARHVLQQLALDGPAIIDQLIQELKTLRADGDGDEASEMRLRQALQRQSNRKERAQEAYLDGDLNREDMRKLVARCEEEMARIQAELDRLEARKDGVQLEEQRFHEIRQLLEQELAGGDTVLDELIQRITVLEDCFLVELVELPVRFRVHAEGIGTGRNYHIEVTECTLEPLS

SEQ ID NO: 6780 - protein, 541 aa, unidentified
  source 1..541: note = uncultivated organism
MARRSRRNALPEETGSERSCRAAVYIRLSAEDSQTGSASVETQQYIIGHFLESHPDIEYFHTYIDNGLTGTNFNRPAFQSMLNDIETGAVNCVVVKDLSRLGRNSIDTGYYIEQYFPQRKVRFIAVNEGYDTADGNGRPDMMIALRNMVNEAYAADISRKITAAQRQMRKDGKFIGALPPYGYLKAPEDCHKLIVDPEAAAVVKQIFAWAANGMGINTIATRLNEAGVMTPSYRRAEQGLITNEKRLGSGSWQTFTVKKILRTEIYTGDMVQGKSKIVARKQISTNPDEYTVVPGTHQPIVSRELFEHVRGILDRTAQICREREKSAYSPNLLKGKIFCAACGHPLHRQREKRKKTADQYFYYCITNTRVKQDSCPGVIIYEKELFVVLLTVIRKTLESALGESSVISKTQTEDQERQLAVIEQEIRRRNGQITGLYENLTIGVISRGEYDSLRKHFETRLMELNTEAARLREDLQTREENSRKLRTLREENAALRENPTLTQELIDRLIERIDVSPDKSLHIRWTFKNEYGEEAPSCPPM

SEQ ID NO: 6781 - protein, 692 aa, unidentified
  source 1..692: note = uncultivated organism
MSIRSDTFIPLAQLAAHLGRQLRIALLERRSKHDEDTKSLQVQHDALLRFLATLPAGSYVCDMRLAEDGGDVYRQVVSAWKGDGKHKLLRRVLADLSEYDVVLVHRMDRFGRNVVAVLTALDDMAQAGVRLYSVEQGLDTADPKQQFNTGLYALLAQQSSDLTSTRIRENKTRAKELGGWRGGAITFGYRKAMTTGPDGEPVPVRDAAGYKTLELDPAEAPHLLAVIDKVVDHGWSVAAAVRWLNEQGVRSPRGTRTTVDGSREPIAWSVTGLKRVLTNPMLMGYDVVGVGKHRFQILEVDGHLHRPHPPLITDPRWHKLQIALGSRTVPRRPATESLLAGLVTCGAHRGDNTVCGRRMHGPGTITSDSASYACRTSNTLPLGDPRRCTGNSISARGLHRLVETTVLAIAADPRWQEGLRTAYRQARAEAATAQATDLGAELAELQRRMTDLREERNSAKSNSRRTQVTHDIDALDARIAELEQLGQTPDLADDVEIDFHARWQTMDQSERRAVIADLIERIDVDTSGGRGRAFDPTRVRVHIRHVGVLQLTEPLPPAPALVCPECGACFERPAGLGVHRRHRHGVLGAQAKAAGAATVYACPQPGCERRTTSAGGLKRHITAAHPDTQQPLACPHGCPKTFATELDLSSHLRQVHGSARDATPASCPECDRVFRGEHGLQVHQGRMHPHAG

SEQ ID NO: 6782 - protein, 530 aa, unidentified
  source 1..530: note = uncultivated organism
MKQTNTVSPPAPRVTVIDPRIPEKAKLRVAAYIRVSSDSDDQLNSYIAQVDHYTKFISSREDWELVDIYADEGISGLDAKNRDDFNRMLADCRAGKIDRILVKSMSRFARNTKDHIQYIRELLRLGISVRFEKENIDTGKMTSEQVAQIYGAFAQMESTNHSSTMRISVQMRMQKGIFTPPSAPYGYRPVNRNLEVIPAEAAVVRQIYASYLSGQGFADIACSLNRSEVERGRMGRTWHPRTIQYILTNVSYTGDMIWQKTFATSTIPFRQIENRGQKPKYFVEDCQQPLVSKEDFQRVQDLMALRQEQFSGAATKPEASVYSKRVVCGACGSVCRRKVTNGKVYWVCNRHDTAKAACPVPQVPEGEITAAILRLYHKLRLEDGMQLLRTVLSQLQELRELELRSNRKINDIDKEIAKVSEQNLVLVRLKSKGYVDPALYLSQANEIDRKLKELRRLRRNILESAGEDGQIQATQIMLEYLEDAPEQCGAVDAEVFESLIDRISVASVTEIKVRLQNGLELTEHIERAVR

SEQ ID NO: 6783 - protein, 528 aa, unidentified
  source 1..528: note = uncultivated organism
MLDNVNTAAGRKKQLRCAIYTRKSHEEGLEQEFNSLDAQREASESYIESRRMQGWQNLPDRYDDGGFSGGNMERPALKRLLDDVDDGKVDVIVVYKIDRLSRSLLDFMKMVELFNEKGVNFVSVTEHFNTTDPTGRMFLGILITFAQYEREVIAERIRDKVAAAKRRGKYCGGPAILGYDVDRENKKLLTNPDEAPMVLHIFRRFTQLASARKLTQELNEQGYKTKSWITKKGKERKGTEWNTGHIYRLLGNRIYIGEVVHKGESYPGEHQAIVDKDLWNKVQSILSENTRAKQSKARSTMISPLQGVIRCGHCDCSMGPTYTQKGERRYTYYICEKDAKRAVSRCPLKRVPAGDIEKAVLEQLGAVFRTPTLVAKTYFAAKEMEEAERERLTKQKEQLEEDLTLVRKRALELMSPDGNEPDREEKLAKINQRAVTLTRHLTNVSAGLRVFESDQVTERDVSETFESIETFWEDLFPLERNRLVRLLVESVKIRESGIDMELKTNGLTSLITELTGLACEVRERSNSQ

SEQ ID NO: 6784 - protein, 544 aa, unidentified
  source 1..544: note = uncultivated organism
MNARAAAIKPAVLRCAVYTRKSSDEGLEQSFNSLHAQREACEAYVKSQVGEGWTALPDAYDDGGISGGTMERPGLKRLLAEVAAGRVDVVVVYKVDRLTRSLGDFARIVEIFDKAGVSFVSVTQAFNTTSSMGRLTLNVLLSFAQFEREVTGERIRDKIALSKARGMWMGSVPPLGYDRGDHVLIPNPAEAETVRMIFRRYLKIGSVHTLCADLGRQQVLSKRYVTEAGKVMGGVAFTRGSLFHLLKNRHYVGEVVHKDQTYPGLHPAIVETALFEAVQARLAKNRVRRRRGQAKVAEHLLTGLVFDQDGRRFSPTFSTGRSGRIHRYYVLADVQQGREGPTRDGAVRRVGADALETFVLGELRRLADRPAIGAEDVPALLKRLELRANDTHLIVDQEALFAGDHPELALEDLRARLGADERLVVEPGGHTLRIALPRRMQLRGGRTWSAGQETASSQAKPDPTLVDGLRRAHVLAAYDEAAKRSPYERALRKVAFLSPDAQRAILEGRQPAGLTLQALLRTEPPLSWREHGSWLGQMAQPAVA

SEQ ID NO: 6785 - protein, 521 aa, unidentified
  source 1..521: note = uncultivated organism
MSKRPEPKPTTRVRCAIYTRKSTQDGLEQEFNSLDAQRESAEAYIASQKAEGWQCLPDRYDDGGFTGGNMDRPAVARLMADIEAGKVDCVVVYKVDRLSRSLIDFARMMELFERKKISFVSVTQQFNTTQSMGRLTLNILLSFAQFEREIISERTRDKIAAARRKGKWSGGRSVLGYDVDPVTKKLVVNAADAELVRDIFRMYLQRRSLLDVCRELNRRGLKTKAVQTRKGAAYGGRVWDKPAVLKVLANILYRGKVRYKTETFAGEHDAIVDEALWTNVHELLRSNGRAGGMLVRNKYGALLKGLVHCGPCGLTMGHTTANKGKDRVYRYYVCYKAQKQGWDACPCRSLPAEQIEGFVVEQIKRIGKDPALLSLTLSKCRQQLTQQRAEAERELGVVERELGRLHADLGRTAGDAATDGHAAARLADLHQRVQAADDRAAALRREIADADAGQITKAEVDAALGEFDGVWSRLSPKEQTKLMRMLVQRVDYDATKGSVSITFHPLGLRSIGQHANEEVSV

SEQ ID NO: 6786 - protein, 589 aa, unidentified
  source 1..589: note = uncultivated organism
MEVEVIKGIKPAIGFVNKKTEKLRVAAYCRVSKDTEDQLNSYRSQVQYYTETIQKNSDWIMTEVYADEAITGTLVTKRESFQRMLNDCLAGKIDMIITKSISRFARNTLDTLKYVRLLKEHQIAVFFEDENINTLTMDGELLLVVLSSVAQQEVENISDNVKKGLKMKMQRGELVGFQGCFGYDYDPETKSISVNREEAEYVRYIFNRYLEGAGSTLIAHELNEKGVLTRKGMGWVHTSVMGILRNEKYKGDLRMGKTYTDDPIAKKRRINYGEEDQFYIKNHHEAIVSAEIFDKAQEIRQARGSANKWTDEQRQQRKKLGRRYTFSSYLECGFCGSNVSRKSWHSSSKYNKYVWGCSISVRDGRRFCPASKSIPETDIEAAFIQSYRLLCSDNKEVLDEFIRRIEESLKEETVSRVIEKLDKDIGTLEKKKKRLLDMVLDEKIQPDDYEQKSKEISDKLEKLLNERAVNSKKRLEEKSLKTRTMEFKQFLEKNQVIDTFDKTVFESVIEKVIVGGKDNDGNDDPYKLTFVYKTGISNQVNASKKHTKITESMKGNVSKMSSSCTDEAKEMFPSCTTDECRSLLSESGF

SEQ ID NO: 6787 - protein, 521 aa, unidentified
  source 1..521: note = uncultivated organism
MKKITKIDPSENGLRIRKLKVAAYCRVSTDSDIQLTSLEAQKTHYEKLISANPEWEFAGLYYDEGITGTKKEARPALMRMVADCEKGCINRILVKSLSRFARNTTDCLELVRKLLRLGVTIYFEKENIDTGAMESELLLAVMSSLAESESVSISENNKWGVRHRFENGTFKISCPPYGYNVKDGIFSINEEEAKWVRFMFSEVLAGKSTYRIAKELDERKVPTRKGGRWSSATVKGIIQNEKYIGDCLLQKKYTDFRFQRHHNHGERDQFYMTDHHEPIISKEDFEAAGEMIAQHAKEKNTLEGGEKFLSRYAFSGKIICGECGSTFKRRTLINDGRKSYAWACRRHLEHSADCTMKAIREPVIEDAFTAMMNKLIFGRKEVLQELLSGIRRQNHSSSLQRINEIESALDEMSERRKTLTTIMSKGYLEPAAYTKETNDLINIEASLEEERDRLVREINGDMKKTEELKELIAFTGEAEMLTEFDSELFEKYVDHITVISREMLVFNLKCGLNLEERIRER

SEQ ID NO: 6788 - protein, 569 aa, unidentified
  source 1..569: note = uncultivated organism
MTTTTKRAVIYLRVSTRDQAKRGGETEGFSIPAQREACHRKAKSLGAEVIEEFIDAGESAKSAQRPELQRMLTYVKHNTIQLVIVHKVDRLARNRMDDVQINFEIQQAGAQLVSCSENIDETPSGMLLHGIMSSIAEFYSQNLATEAKKGMTQKAKSGGTPGRAPFGYINTTQRTAEGREVRTVVTDPDRAHWVPWIYERYATGEWTIGMLRDELKTHGVTTLARPKQPAKPLTTSMVHAILSNPYYTGLVVFGGATYQGRHQPLISTELWSKVEAIRHGRSHAKEKPAIRTHYLKGSLFCGQCGSPLSYEISRNRLGNYYEYFYCLGRQARKNGCTFVAIQAHHAEQLIEDHWATITLPDKTLTTVRELVISHLDAILKEHDHQAHQAETTLAEAIAHSERLMQAYYAGAIDVELLRKEQDRLRTSQVAAERQLRHLQTSRDKLHTALDQCLSVLHNGQQQYLAATDNSRRDLNQAVFDKIYLDDDEITNSHHKTVYHYLLDSNLPAVLEGEAKKQRDTATPDNTKNLRPMAGGSKMTLLVELRGFEPLTFSLRTRRATSCAIAPSTG

SEQ ID NO: 6789 - protein, 538 aa, unidentified
  source 1..538: note = uncultivated organism
MKTIEPKEKKIINCAIYTRKSVSDGLERDFTTLDAQRESCESYIASQKNEGWICSPEKYDDGGFTGANTDRPALQRLMTDIKASKVNCVVVYKVDRLSRSLLNFSELLSVFEEHGVTFVSITQHFNTQNSMGRLTLNILLSFAQFEREIISERTRDKMGAAKRKGKWIGGRPPLGYNIDKEKHKLVINSKESEIIRKIFDTYIEKRSLLSATMTMNELGYTTKRHTSENGRKFGGIQFRSNGMQQLLRNPLYTGKVLYHGEIYPGEHEAIITDETFQKVQNILVENRPDWKMTKKIKHVGLLTGLLRCKACNCAMYYCYNIKASKYKYYYYLCMSASKRGYKTCPTRLLSAQKIEQKIVELLRTLTSMPKLDEKVWDTFSLQDKIAIIKSVLKEANFDGNKGILEIILLKDNKARQYKVELKELKNLPVPPNQINIKNEPQLRQNLILAHQIQDIIAKDKAQDLKQVAGWLNLSHVRICQITGMLLLAPEIQEEILFSDNKRLFEIPEYKVNEVTQELTWPKQKELWQQLVRTPTKER

SEQ ID NO: 6790 - protein, 560 aa, unidentified
  source 1..560: note = uncultivated organism
MRDFPRETLNITKSPCSNEGTHRSDFVTLRYIQRFPGNNQRDESIDAQERAIRKYAEENDIEIVEEYIDRSRTGTNTDREEFQRMLNDSRYGLFDLVIVHKLDRFARNRYDSAISRKILRDNGVELYSVIEKFDNTPESIILEGLMETLNEYYSANLSREVMKGMRENALQCRYTGGYVPLGYRVDDTGHFRINEEEAEVVRRIFSGTIQGMSYRELQQEFNEKGIRTRTGKLFGKNSLYSILTNEKYIGVYVYNRAVSKDSRGKRNNHRSKPDDQIIRIENGIPAIVTREEFQAVQELLKKRRRSRRGRTDTGNVYLLTGKVYCGICGGKYCGNSQYSGRKKTLYYCYRCNVRSRRGGIGCSNREISRNCLEKYVLRLLADILFDKDRLPAVIEEYNRAVTQAESSVESDRKRLKKSIKSLENEVGNIISVIARTGSESLTAALDGKEKELAELRAQLSGLERRSARVDIDEEQIKRAFDYGRELLLSGKIPRLRQLIELYVERVEILPDSVSVTLNILRGLQANESGAALDRLNRTYPEALKITRKADREEVVSASGE

SEQ ID NO: 6791 - protein, 543 aa, unidentified
  source 1..543: note = uncultivated organism
MNKTGQENKQRIYCAIYTRKSTTEGLDQDFTSLDAQRESAINYINSQKHEGWVPLPTTYDDGGFTGASIERPGLQKLLNNIKQGGINCVVVYKVDRLSRSLMDFAQLLEFFDKNNVTFVSVTQQFNTNTSMGRLTLNILLSFAQFEREIISERTRDKMGAARRKGKWVGGLVPLGYSLDKPNKKLIVNNEEVELVKEIFALFIKGNSLLKVSQLLNDKGYRTKLTAGKTGRGFGGIKYGKTHIQSLITNVVYIGKVCFAGKIYDGEQPAIIDEDTFRKAQEQLKINTVERRATKNMDCTGLLSNLIKCKACGTFLYHTYTRKGKHKYRYYVCTSAQKRGYHSCPTTSINAQAFEETVINCLLKLYTDAKIDNHKQKTEIEAFLSPVWNDLFPDEKKRIIKSLVREISYNTDSKRLCFSLSDNTHHEFDVDLKNVRPMNKWHKEVEIDKEPRVRRNLILAHQLQHLMDTGRIKSMKQASEWLGLSEIRISQVLNILLLSPQLQEEILSLDNTLISQIPEYKLRPILNEILWEKQRELWSESFKS

SEQ ID NO: 6792 - protein, 512 aa, unidentified
  source 1..512: note = uncultivated organism
MTQTKTICGLYTRVSSRNQAEADYSSLETQRERLEAYCKSQENYTVYRVYEDGGYSADSLDRPALKEMLRDMREGKLNCVLAYKIDRLTRSVKDFHLLMDLFDRCGVKFVSVTQSLDTQNPLGRLLRNVLLDFAQFEREMTADRTRDKMHQRAQKGLWNGGNVPYGYRAENKRLVINTEEAARVRFIFERFADSPSLSRLREDLHRRGWYTRSNKAWGKTALDQILRNPIYAGHVRFNEQLYKGDHAPIIAENLFQKVQSVRRDRSHGSSRLNRVFLLKGLIHCSECGSWMTPHYTQKRNKDGTTHRIPYYRCTKTMHFSNSVCSVKHVNADHVEALVVGKLAELSQNESYLKASVADLNDDLQRKVGPFQQEARRIRRRLDEIEQEIDRYVNALGQGKLSIRRLELQIEKLDADKKVLQSELFECERKINGPVVRDYNADLLRRTLEDFRSVFTALTPLERAEALQYILKGVSVRPDRLALEIFELDEFRLGSQKRQEWLPGQDSNLQHFG

SEQ ID NO: 6793 - protein, 550 aa, unidentified
  source 1..550: note = uncultivated organism
MKIAIYSRKSKFTGKGESVENQIQLCKEYIGRNLDCPKNTIIDVYEDEGFSGKNTARPQFQKMMSKARQKYYDYIVCYRLDRISRNVSDFSSLIDELQQYKTSFICIREQFDTSTPMGRAMMYIASVFAQLERETIAERIRDNMLLLARTGRWLGGNTPLGFSSKQVHKDTIDGKVKTSYKLKPIPEEIEIVQYIYDKYIDLRSMAKIEEHLIRRDIKTRKGKYFTPVAIREILSNPVYCMADETVYDYFVKLGADICYDKEEFDGKHGIAAYNRTSHEHVGQTKNNPAAWIISIGRHKGIIDSKCWTEIQVILRANKHGSVHKRVHNPISLLSGLLICDHCGSKMRPRVNSNKGVYANGVQTFSYLCDMKKRSKAQKCNCENLNGNEIDQAVCSTVLNLCKEGSDISKKIVELKNTAVNQRKTSLQMTDSIQVKIQEKEEKIQSLIAVLGKNPNSTTLYKYTELEVDKLDAELKLLNEQLVVWRNEEENANNNCNDTNMIESTIKTVGRAFYQSSIHVKRAFLADLVEKITWDGQKVHIYFFGEKYYYR

SEQ ID NO: 6794 - protein, 645 aa, unidentified
  source 1..645: note = uncultivated organism
MGGIEQGLPVGTHPGLALGGAQPDGKVDAQERIGVRQLAVELQRLGVVPKGLVRCQARQRRFGGLTGVVDGLVEVDRLRGTEPVVGEVPDACPRTPTAHRLQGLGHGAMGPRPARGPEVLVHGVLDDGVGSRGQGGGVMTRAAVYCRISQDKEGRRLGVERQEEDCRALATRNGWDVVDVFTDNDITAAKVKGGKVKVRPEYDRMVAAIKAGKVDAIVAYSQSRLTRTGTIEGFIDLCEAAGIESVAIVTGAAINPGGNLVTARVQAAVDAEYVRKLSEDGKRAKRQILEAGQWLGGRRPYGYQIHKPSPKVPSVLVVDEAEAARVRGWARDVLGGRSLNALADACIAEGVPTSTGRGTWAPQTIRRILLNRVYLAEPPAQWEAILDVETFTAVGAILGDKKRRPKKIGARYPLVGVLRCYCGERMVSRPTNKHGASIRRYGCRAHGTVSAEQAEEDVFNTVARLADLPRVGQIIRDAEGHEDEEAQALRVANAEDSAAIADLLGAVGNGVTMAQVRPQVAALNARIAEREAQLVERAGRSALDRFAGRVVSQWDTLDVEDQRAILLSLVRNVVVGPKVNGYGWHSERLQPVWRFSALAAIKWPEPTAADEAEQQRLSDEYREEEDLAQLRADNAEADAETRAAG

SEQ ID NO: 6795 - protein, 597 aa, unidentified
  source 1..597: note = uncultivated organism
METKELTIKNDPRKYAIYSRKSKFTGKGESIENQIELCKQFLNSKFEGVSEDELLVFEDEGYSGKNTNRPEFQKMLKAIRNNEVKIVACYKMDRISRNLSDFVEMYDEFSDYNVEFVSKNDNFDTSTSMGRAMLQITMVFAQLERETIAERIKDNMIELAKSGRWLGGITPTGYKSTQITGSITFDGKERKAYKLDIVPEEAKTIKLIYTKFLETKSLTQVETYLLQNRIKTKFNKNYTRFSVKSILHNPVYVTADQTMLEYCNDKGIAVYADKSKFNGKYGIMAYNKTAQTAGKANKIKDFSEWVVAVGKHKPLISSDDWIMVQRLLAQNTSKSYRKPKSNIALLSGLLHCSKCGGFMRPKLTQRRNANGELIYDYLCETKEKSKGVICDCKRVQGNILDKAICDKVKELTFDKSEFNAQLKSMERKLNDSVTQYKNNISNLEKTIDKNNKDIERLIESITSSDNSPADNLIKEKINRLSEENKTIEKQIDENRLAIESQNLSDLNLEILKTTLDNFSTTFEDMTVEQKRVALRTFIKRIDFDGENVEVYMNTDDEFDISSKKVFENSKEPQGADSERNINAFQNRKETIKRHIFR

SEQ ID NO: 6796 - protein, 540 aa, unidentified
  source 1..540: note = uncultivated organism
MQAKLKCAIYTRVSTDLQAEVEFNSCEAQENRIRSFIDSQENMEIFKVYSDPGFTGANINRPGLNQILYDIRQRKINLVIAYKIDRLTRSPRDFYQLIELFDHFGVDFISVTERFDTSTPSGRLLRNIMLTFAQFERELTSERTKDKLAQRAQQGMWNGGHSPLGYKRENKKLVIDEKESKAVQYIFNRYINNANTAEIFDGLVSKALLNREGTPISKTRILNVLRNPLYTGKLIYNNKTFQGKHEAIISQEMFDLAQTFHGRRRRTQRLYKNFDLAGLIQCDDCHTFMTPCFTNKVKEGKRTRYYYYRCTTTFKKGWKSCTTKQINAEKLENYIFNNLERISLDKQYLEGIIHKFNHDLESSKNPRIFEVSGVRAGLELLPESSKIPPNLAGQTLVHFVKGLNEKKGIDKNLWAKKFIKNIEYSKDKITINLFYPDEGICPNFNSSNSLVPLDTNPFALHNPAGRTENFQEISQDCMPSDDSLRAKKRPELLDAVPAGSSSSRTRTCDQLVNSQLLYRLSYRGMCGDYTEKQFWHQVFF

SEQ ID NO: 6797 - protein, 534 aa, unidentified
  source 1..534: note = uncultivated organism
MQKNVEVIPAKPINELKGLKITARTRVCAYCRVSTDNTEQLSSFEAQISHYLGYIKDNPEWEFAGIYADEGISATNTKKRLEFNRMINDCMVGKIDMVITKSISRFARNTLDCLQYVRQLKEKNIAVFFEKENVNTLDSRGDFMISLLGSLAQEESNNLSKVTRIGIVYRFQEGKIRVNHNRFLGYTKDENGELVIVPEEAKIIKRIYEEFLEGKGCNKIARGLMADKILTGSGGEKWYESTVKKMLKNEKYMGDALLQKSYTVDFLTKKRINNKGQVAQYYVEDSHPPILSKEDFIAVQAEFIRRSNMRGYSKTGKSAFTSEYAFSGKLFCQKCGSKFRRAAWGTGKNKKHYWICINHEMNSKEACDMKAVAEKEMEKSFIRAMNKVIGGKETFINRLMVNIYKGLESVEREYTMEGIEARLTELQQEIRSLVRLNVKTGLDTKVYDVEYSQLATEIELMRERRQELKTAEAERVLRVNRIEELRLYLIEQDTTLDKFDMDLFRKLIEKVKVQSMVEAVFVFKTGVEVREILG

SEQ ID NO: 6798 - protein, 525 aa, unidentified
  source 1..525: note = uncultivated organism
MTARQKAAPAATTPVRRCAIYTRKSTSVGLEMDFNSLDAQRESCERYIANQACLGWKLLPDHYDDGGFTGANLERPAFQQLMRDVEAGKIDVVVVYKVDRLSRSLLDFAKVMERFSNGGAAFVSVTQNFSTADAMGRLTLNLLMSFAEFEREMIAERTRDKIAGARRKGKWTGGPAPLGYDVVDRKLVVNAAEADLVRRIFDLYLAKRSAVAVAHALNAESRTTKHQVTKEGKSRGARPWDKNAVLHALRSPIPAGLVPCGKEVFAGEHKAIVDRGAYERVQALLKEGSKPQHRWGRNPDYILTGLLRCARCNAAFTPASTRKANRTYRYYRCSTRDKQGIDACESSPLPAAAIEEFVVERVREALADGKLAKEVTENARAAVAKQRDALQKERQRLPTDIAALSTEGKRLVETASSVTGTGRRLLDAKLQEKGDQLGRLERRLVEVQRRLALLDQIELEASWVTSCLTKFDKVWETLSAENRGRLVRAVISRVEVDEPKNDVQTYLADLATSLDDLVGGAEEAA

SEQ ID NO: 6799 - protein, 577 aa, unidentified
  source 1..577: note = uncultivated organism
MAKRSVAGTRPGRQRLRCAIYTRKSTEEGLEQDFNSLDAQREACEAFVASQKHEGWTVLPAAYDDGGYSGGTLGRPALQRLLDDIRGSKVEVVVVYKIDRLTRSLLDFAKIVEVFDAHGVSFVSVTQAFNTATSMGRLTLNVLLSFAQFEREVTGERIRDKIAASKKKGMWMGGYPPLGYDVKDRKLVVNETEAETVCTIFRRYKELGSVRLLKECLDAEGIVSKRRTANGRTYGGKPIARGALYHLLQSRLYRGEIVHKKDVYPGEHAPIIDQGLWEKVQTTLASNRVDRGASTSHNHVSLLAALIYDAHGQLMTPSHTVKKGVRYRYYVSKSLVTGGITAEGNGQRIPAIQIETLVTDRVRAWLADPVAVLNALPSCESDVVAQKRLLGEAARLAASWQALGAERLRAILRAIVRKVQVHGDRVEVTLDQRAAALWLAKDQKQPAQASGGDREQYSTVLTIPARLKRAGIGMRLVVEDGSEPANVDAALVRLLLRAHAIRARVIEEPGLPLKQFAAEEGVSSSYVTRLLRISFIAPDIVTAILNGNQPPQLTANRLMSDTRLPLDWGAQRALLCS

SEQ ID NO: 6800 - protein, 543 aa, unidentified
  source 1..543: note = uncultivated organism
MQKVRCAIYTRKSSEEGLEQDFNSLDAQREACEAYITSQKHEGWIALADHYDDGGISGGTLERPALKRLMQDIDDGLVDQIVVYKIDRLTRSLGDFARLVDRLDAANASFVSVTQSFNTATSMGCLTLNVLLSFAQFEREVTAERIRDKIAASKKKGMWMGGMVPLGYNAAGRTLEINEGEAETICTLFELYHKYGTVREVTGQAAVLGLRSKKRESSKGVLYGDIALDRGHIHHILTNPIYSGRIRHRDKTYEGLHEAIIDPEVWGDVQTRLQVKAAYRRGEGLRATDPSPLIGKLFDETGDRFTPSHSSKRGKRHRYYVSHRLVKRAGEKDLSGWRLPALQLEQQISKTLQEHLATAATPVMVKDLTSEEIVRVRAEMELICLKQKKLFALIERIDIAAGSLKIQLDTGAMIALLQIEPDRLNQASMNFTRPFRMRKRGVETKLIIGDKSAELDDALICNIANANHWLAMITSGKTFDEIAATEATSKRRIQQVIEWAMLAPDIVRMIVEGHQPPGLTSNWLLRHALPTDWNEQRELIATL

SEQ ID NO: 6801 - protein, 521 aa, unidentified
  source 1..521: note = uncultivated organism
MQAQHAHVRVICLYRVSSKRQVEENDIPMQRKACRAFCQKQGWTIVREIYEQGVSGYSTDFQSREAIQQIKQAAITKEYDILLVYMFDRVGRKEFEVPALFQWLVDNNIGVWSTQEGEQKFETEADSLLAMIRSLMASSESKKLSTRIRTKHMQMAMAGEFRGGPVPYGYRVIDSGRVGRDGHPVRELRIHESEAQIVRMLFEKVAYEQKGVYELSSMLNEMDMADEMAKRSWRATTVRALLSNRIYIGQMHFGDAHSMPFEHMCIVSKDLFNKAQERLHRKRKTRNIVKPQNQEAPSFYDILYCAHCGAHLVYNSVHSVNENGSINTRYIYRCYNKLNYANKCIGQSTYAKNRVDTLVQRKIRDTLHLLMNVSEDDLVSNAVSSEIARHRHRLDELSEQIQLNKNEIKIIKDSIVLITNDYGIEAVTNMQLLLAELLSAKSILADELERVRATFVSVDRLALRFKEELSKLKEHYHDLHNIDDKEIGEISSRLFQKVTVDSSYHVEVSMTCHVGKFFGCQ

SEQ ID NO: 6802 - protein, 517 aa, unidentified
  source 1..517: note = uncultivated organism
MDVIDITPIARKKAEKIRLAAYARVSSKSEEQLHSFAAQVQYYSGYVKDHPEYELIDIYADEGITGTEMAKRKELNRLLRDCKSGKIDRIIVKSVSRFARHTEELVATLRMLKELDVSVYFEEQDIDTEKLNMEMIVTFSGLAAQKESEAISGNLRWSFQKRMESGEYNCTFTPYGYERVNGEMVIKESEAVVVKRIYELYLNGTGIQTIKSIFNKEKVPKRYGKTHWHHSSIKYILTNERYKGDALLQKKYTTNSLPYRRKQNKGEYNQYYVENSNIPIISKEAFERVQELLRSRKNEKSLYNIYLLSRKLICPECGSTFRRQQIKEKVYWLCMKTSLGYTECQSRRIQENIVYETFIDMLYKLKYYHHQILGTLLNSLEQLHSRTSQSQERIRQIDKEIADLAAKNLIVTRLHTSGVLDSFGYSTQTSEIENKLVELRRERRKKLSEDENLIIEELKGLNEIIEEYQPSNQFDEDLFEQIVEKIVVNDRTKITFHLLGGLELMEEIDEKGRWKVS

SEQ ID NO: 6803 - protein, 518 aa, unidentified
  source 1..518: note = uncultivated organism
MRRRKPPTQPPPIVRCAIYTRKSTDEGLDQEFNSLDAQREAAEAYIRSQAGVGWTLVPDRYDDGGFTGGNLDRPALRHLLADIEAGKVDCVVVYKVDRLSRSLLDFARLMETFERKGVSFVSVTQQFNTATSMGRLILNVLLSFAQFEREIIGERIRDKIAATRRKGKWTGGTPILGYDVDRSNGRPRLVVNAQEAARVREIFQLYLSLGSLLEVASELGRRGWQNKAWKTRRGQLKGGRPFDKGSLYALLTNPLYAGKIRYKAELHQGQHEPIVDTEVFQQVQATLRHNGRSGGVAVRNKHGALLRGLLYCKACGRAMTHTFTCKGQRRYRYYTCTRAIQNGRKACPSPSLPAGEIERVVIDEMRAIGRDRTLRAEVLRQAQEQFEAERAELLSEERGLRRELGWRHAELRRLAGSVSSADQMAELHDRIAQCETRLREVQRQLQEHEQDRLTAADIDAALADFDGVWNALSPREQAQLVALLVARVEFDAIQSTVAVSFHPTAIKALARKQLGGAA

SEQ ID NO: 6804 - protein, 544 aa, unidentified
  source 1..544: note = uncultivated organism
MPDKVYRTAIYCRLSREDGDKVESNSIASQRAICEDYIARHDDLELVCEPFIDDGYSGVSFNRPQFKELEEAVRRGRIDCIVVKDLSRFSRNYIDGGRYLEKIFPQLGIRFIAINDAYDSLTGDPQSDSFVIPFKNLINDSYCKDISMKIRSSLEVKQKNGEFVGSFAPYGYMKAPDNRNQLIVDEDVRETVQMIFSLYKDGVSIGRIADRLNQMGVLSPMEYKHSKGEKYDTVFKRGETALWTYKAVQRILSNEVYIGVLAQGKRGTPNHKVRVVQKKDESEWIKVENAHEALVSYEDFMAVKTMMKRDMRCPSDCEEAPLFSGFVFCGDCQQTMIRKTVPSKTKKYVYYICSASKGSGDCSPHSISVKELEEKVFHAIHDQIELVIELEKALEMIDRLPSQSRKAFNYEAQITKLEEEIERYQKLKLRLYEDLSDGIIDKSEYSDFRNRYTKIIEDKQEALLRVRKEMRDTVTTGITEKNWVTLFKQYENIDELNRRVLMSLVDRILIYEDHRIEIVFKYKDEYEQTVKFVLGYADELAKAS

SEQ ID NO: 6805 - protein, 573 aa, unidentified
  source 1..573: note = uncultivated organism
MPRKKAGPAPGHIKRKAALYVRVSTKYQVDKDSLPLQRKKLKEYCKMYDIEEYQIFEDDGYSAKNTDRPNFQKMMDCIRKGDYTHMIVWKVDRVSRNLLDFASMYRELKERKVTFISLNEQFDTSTPIGGAMLKIILIFAELEREMTSERVTAIMLDRAENGLWNGARPPLGYSVDPEKQILIPVPDEKETVKMIFDLYEKLHSCKKVARTLYQNGIKPQNCDEWSPNFIRHIIRNKLYIGTYIYNRQENGGADRPEIDWIIKENNHQPIITKEQFERCGSIMDQNAMTRDVSELRRTKHIHVFGGKLVCNLCGTNMNASKDKARENGLRPSVFRCGRRARLLACENKLMISDLSLGPFVFNYAANLARIQKNPSGIDTPEKLEAALLSGDEFSGIKIAPDCLSATFSLLTHRNIGKGSFSPDIGKSESQDGQSEDRIAYLEKEKEKYKSAISRLTDLYMFDPDALTKEEFSERKREMTQKIQEITRQIIDLKENAGSGSADLAFIRKASAFLVAQCIASNEHIDYMQIAVDLDNKILKDFINQIIDKIFIQDGRIMKIRFASGLEHNFVYPD

SEQ ID NO: 6806 - protein, 552 aa, unidentified
  source 1..552: note = uncultivated organism
MSEITQYNAAIYVRLSKEDEDSADCRKAESDSITNQKQLILDYLQDKTEINIVSVRVDDGYTGTNYDRPAFQLMMDDIKAGVVNCVVVKDLSRFGREYINAGKYIDRLFPFYGVRLIAVNDNIDTITRDASDDFSITLKNLMNDNYCRDISIKIRSQFHVKRKNGEYIGSFAPYGYMKAEDDHNKLEIDTYAAGVVQDIFNWKIEGMSQGAIAKALTARGILPPSEYKRSQGIKFKSGFQKNARVNWTAIAVSRILSNPAYIGTMIQGVRTRPNYKIKTVVTNTPENWSVIENAFEPIVSVKTFRLVQRLLAMDTRVPPNCTTVFPLAGLMVCGDCGSAMVRRTVSGKNKYVYYTCSASKDKGICSSHLIPEQQLLDTVLALLQKHILLVVQLDECLSAIKDAPLQRIGMRKAQERLIKADDEAEKYRKLKVSLYQDFREDIITKEDYLEIRAQYDARITDAIIAKDQIQRELDQQSNSSGSRQQWMQDFIDHRNIQTLTRAIAVECIERIAVFEDRKLEVEFTHSQDYASLTDHLEEYYQRESTLSNGEVG

SEQ ID NO: 6807 - protein, 566 aa, unidentified
  source 1..566: note = uncultivated organism
MEPTKPQTLRCAIYTRKSSEEGLEQDFNSLHAQRESCEAFIKSQTGEGWRLIKTHYDDGGLSGGNMERPALQSLLEDIRQKLVDVVVVYKVDRLTRSLSDFARMVEVFDAHGVSFVAVTQQFNTTTSMGRLTLNVLLSFAQFEREVTGERIRDKIAASKRKGMWMGGLVPLGYEVRDRQLVINPSEAETVRQIFRRYCELGSVRLLKEELDRDEVRSKHRIAKNGVQSGGHSFSRGALYTLLGNPIYIGEVRHKGTRHPGQHQPIVERAVWDKTEELLHAHAARARGKTSKSMSSPLAGKLFDESGEGLTPSHAVKGKRRYRYYVSRSLIKGTANQAGTGWRLPAAEIERSVAAAAAMVLDDRTAILADIEQSASDTGQIKSILDGASAWSSRLRSEAEAAEALELLISRVELRPDGFRLSLNLPIGPSEKLTGRGAVDLKLTRLIPMQMRRRGIEMKFVINGDSKTSPRTDPALLKMIARAHCWFDDLVSGRAASMVEIGKREKVGKRYVSRIIRLAFLAPEIVDQIVKGCQPPELTAESLLKDRTQLPLEWESQHRVLGFPFPA

SEQ ID NO: 6808 - protein, 518 aa, unidentified
  source 1..518: note = uncultivated organism
MHITEITPKIAQKAEKIRLAPYCRVSSDSADQMHSFATQIRYYSEYAKKNPQYEIVDIYADEGITGTEMEKRDELNRLLRDCRRGMIDRIITKSVSRFARNTEELIATLRMLKEFGVSVYFEEQGIDTQQMNMEMIVTFPGMAAQQESETISGNVRWGIKKRMESGEFICSNPAYGYTLENGKMVIYEAEAVIVRRIFDMFLQGMGKQMIATILNEEGVPRRNGYTVWHATAVDYILRNEKYMGDAILEKTYTTNCLPYRQKRNNGEREKYYVENYCPAIISQEKYKAAQEMIAIKKGTKRGNTVYTLSKTMRCPDCGRLFRRHVANGKAYWCCSLLTANASKCKSRRVREPMVYDTFNMMIYKLKANRQDLLEPLIQRLEYLQSRTSENIERIRQIDKEIADLSAKNLVVTRLHTSGVLGTAEYSMQTSEISNKITELRIERRKKLTEDENDVMLDELKRLNEILKEYEPTSDFDEEMFEQIIESIIVDDTSRLTFHLIGGLTLTEEIKEKGRCRTA

SEQ ID NO: 6809 - protein, 566 aa, unidentified
  source 1..566: note = uncultivated organism
MNRKQFLAAMYLRLSRDDKSTDGGFDVGDVTDREGNLKSESNSIGNQRELIRAFIHEQQDIELYDIYVDDGFSGSNFDRPEFKRMISDIEAGKVNCVIVKDLSRFGRDYIESGRYIQKIFPALSVRFIALTDHYDSFQADVSESGIVLPVKNFINDSYCRDISTKVKSQFEVKRKNGECIAPFALYGYKKAENNKSRLVPDEYAADIVRKIFAWKMEGMAVSAIAEKLNGLGILSPKEYKKSTGANYKGGFSGAVKSRWSSSTVKRILTNETYLGHMVQGKREKINYKLKKSVDKPQEEWIKVENTHEAIITEDQFQIVQNLLKADGRVSTVTEENSLFTGILFCGDCGEQMIRRMNRYKDTRKVYYICSTKNRGDGCSRHSIEEERLKEIIAEMIRHYANCFLEEKQMFEKALEMETNFESIVRYDTEIARLKGEQDKYYSLCSGLYEDLRQGIITKEEFERLHGDFKRKASEFEEAQKKQEGMIKELFKNGVISAARLKTMQESSELKEIDRHTLCSMVKAITVFENKRLEVEFYYMNQYRIMQEVNKKAKEHKTNKRPEERSA

SEQ ID NO: 6810 - protein, 530 aa, unidentified
  source 1..530: note = uncultivated organism
MTNAVIYARFSSHSQTEQSIEGQIRVCKEYAQRNKINIIGEYIDRATTGTNDNRPEFQRMIAEANTKQFEQILVYKLDRFSRNKYDNVVYKHKLAQCGVRVVSATEIINDTPEGALMEGLLEMFAEMYSKDLSQKVKRGIRESILKGNYIGGHILYGYKVEDKKIIIDEKTAPAIRYLFEEYANGKSKKQIIKELNEMGYKTNQGKAISYNSFQNNLTNIKYTGMFDNGTLQNENYYPAIISKDLFDKVQIKLAEHKHQPATQKAKIEYLLTGKAFCGYCGSSMVGITGTSKTTKKYHYYACSKRYKEHTCKKKNEQKEYLEKYVVEQTLNYILTQEQIENIANGMLEKWNTNTTTLQIKKLEKQIEKIDKDLDKCFDMFFNADSQELQKRMNEKSKSLEIQKQDLQEELQKLKLIKIITHTKEDVKNLLGEYLDGNIEDINYQRKIINKFVNSVYIFDDKIAIYYNLFNLRKFTYEEALENITENEKFLFQNDCSANTSASLSISRLAFFFVINLLILYQYDVIFKQGE

SEQ ID NO: 6811 - protein, 542 aa, unidentified
  source 1..542: note = uncultivated organism
MRSKQLQLNSKVGLYMRLSKDDERAGESLSIENQRIILTKYAQERGWTITDEYIDDGYSGTNFDRPEVQRLLEDAKTGKIDTIIVKDLSRFGRNYIFVGQYVDYIFPMYNIRFIAISDNVDTANTNSAGMDMMPIMNVFNEWHSANTSKKIRAVAEANAKAGKYRSTHAPYGYVKGTGDKCLPVIDEPAASVVRRIFEMRASGKTYKEIYTVLNDEKVPIPAVYQFEKFGITNKKPNKNLWADSILRSILKNPMYLGHLVRLRYTTVSYKNKRRVEREPIVFPNAFEPIITQELWEKCRELDESVSHGKHTSWGIMPPLSGLMYCADCGGKMKLGRQDLKPSKAHPEKRSRYHYICGNHSRFGKYYCYNHYIRIEDIEQIVLDDIRSKARLVLEDEDKARTDFLKHKEQMSAAQYKSDSKALTQKTKRYEELERLTQSVYEDKVTGKIPEEICLKLLAKYTEEQNALKSEIDELENKLSVVTKNEMDVDEFIRRLKHYTNVPELTRELCMELIEYITIGAKPGDKTGTREIHIYYKLLGKES

SEQ ID NO: 6812 - protein, 515 aa, unidentified
  source 1..515: note = uncultivated organism
MRTWNTAGYLRLSREDGDKSESDSIAHQRRLLEQYIAEHPELRLIDFYQDDGYTGTNFDRPSFRRMEEDMAAGIVDCILVKDLSRFGRDYIEVGRYLEKEFPARGVRFIAVNDGVDSEQGRYDMLLPIKNLFNTQYAKDISDKVRSTIRSKQRRGEFIGAFPSYGYRKDPRNHNHLEIDPPAACVVQRIFDLCEAGLGQLKIAKVLNAEHIPSPSEYKRLSGERYHNGRRMDQTTYWTYATVHRILQNQMYLGNMEQGRSERPGMHGKARQRQRAEWIVVPGTHEPIISREQWERVQSLLQKRTRQLSFEQNQSPFAGFLRCGACGRAMVKTRRPGGLSYSCGSYKRYGPTVCTRHSISHAALEQIVLEDLNRLLSSAGDLNILAQQSAAGLPHSSGGPPEGERLESALQRLRRLKKSAYEDYRDGLLSRADCLAYQADYEAQIQALTRQLAQLAREQKDDPLRRPWVDTLLRQGKLTELDRVTVAETIREIRVFPDHHLEITYTFADDAGLLSG

SEQ ID NO: 6813 - protein, 553 aa, unidentified
  source 1..553: note = uncultivated organism
MTTMPNPVRCAIYTRKSTEDGLEQEFNSLHAQREACEAYISSQRHEGWQLVPDAYDDGGYSGGTMERPGLKALMQAVENGLVDVIVVYKVDRLTRSLADFAKIVEILDDRKASFVSITQAFNTTTSMGRLTLNVLLSFAQFEREVTGERIRDKIAASKKKGMWMGGPVPLGYIVENRKLVTQPEEAKRVRTIMRRYLASKSAPALLVQLESEGILTKVQQRVSGPHRGGIPFRRGSLFHLLKNPVYRGKIVHKGEIYNGEHQAIVDAELWEAVQAKLASAAPPRKRPGNDPQQALLKGLLSDSQGRPMVPTYATKGVRRYRYYETRRDLTGTDKAESTRYAMVHLERHVAEHIGALLGDQYALRRIADLTDGASLRMMFARAELHRQEMAKDLQSVIHKLVRNISFAPDRMIVELDPNQFGIEEPATCSWTHEIPLLRKKPFREAKLRINSNDDGPANIDPKLIGLLADAMSAQKLVLASPGVPLQKIAMREGRCRKQLTQLVKLSWVSPRIVEAIVEGRQPSMLSRKRIMDTDLPLAWGDQERLLGVSSLTK

SEQ ID NO: 6814 - protein, 540 aa, unidentified
  source 1..540: note = uncultivated organism
MARKSRKGSVETPAVQEQDVVYNAAAYIRLSSDAKRKPGDSLYNQQDIIENFIAASPDIRLADIYIDNQATGTNFERPAFARMLEDVENGRINCIIVKDLSRFGRNAIDCGYYIEKHLPALGVRFIAVTDSFDSLEGDGGVMLPLKNVIAESYALDISRKCRSVQRQNIQDGRFVGRMAPYGFSKAPEDCHRLIIDEEAAPIVRQIFDWAASGMGVGEIIRTLNEQSVLPPSHYKWEKGLITSEKLLGKPFWQKRTVMDILRDRVYVGDMAQGKTCTTGGRQNSVHRDEWICVPNTHEPVISRKLFEHVQDVLHQTSEKDEAVRSAAISYSPHIFKGKVFCAHCGHPMHRHRQNKDGTYWYRCESQWKYHKGACYQVSVKEEEIKAEVFALLRKHAEAILGGHIRIERMTPVKNAAAETELEEINGQLASSGHFLKSLYENMVAGLINAEEFTAMKTDYEGKITALSKRADQIRTQRRERATEQESYRDFANAASDALSSKELTADAINCLVERIRVQRDKSFEILLRFKDEFREVKRVG

SEQ ID NO: 6815 - protein, 530 aa, unidentified
  source 1..530: note = uncultivated organism
MGADRRRKDPGNVGGAPSIVRCAIYTRKSTDEGLEQSFNTLDAQREAAEAFINSQRHEGWVPLQQKYDDGGYTGANMDRPALKRLLADVESGIVNCVVVYKVDRLTRSLLDFSRIIEVLDKHGATFVSVTQQFNTTNSLGRLTLNILLSFAQFEREMISERTRDKMRAARRKGKWVGGNLVLGYDVAPQGGSIVVNPAEAQRVRKIFGLYLELGSLIPVVEELDRRGWRMKSWTTREGRQTGGKPIAKNSLYNMLTNMIYAGKVDFGGTVHEGEHERIVDDDTWNRVQAALSRNGRRGGRNVGNKHGALLKGLVRCGSCDVGMIHSYVSKKNKLYRYYVCVKAHQRGWAQCETRSVSAPAIEDAVLSQLRGIGRNPTVLRSVLREIEERRRRDVMGLQREKADAELELKQIVQEMSSVAPMAGTLQSATDRMAELQDRSKYLNNRASELLSQLNRIEAEAADPKEVEAALQEFDPLWEQLSTWEQESFIRALVDQVRYDGKTGTVTLGFRSSGARNLCDWTAERMRGTQE

SEQ ID NO: 6816 - protein, 518 aa, unidentified
  source 1..518: note = uncultivated organism
MSNKPTQRPKTIRCAIYTRKSTEEGLDQQYNSLDSQRDAGESYIRSQANEGWELVPDRYDDGGFSGGNIERPALKRMMEDIQAGKIDCVVVYKVDRLSRSLLDFARVMETFDKFSVSFVSVTQHFNTTHSMGRLTLNILLSFAQFEREIIGERIRDKLAAQCRRGQWTGGYPVLGYDVDRSERTPKLVINPEEATKVRRIFSLYLELKNLMPVVEELDKRGWTNKLWHSKKGLPKGGRSFDKCSVHALLTNPIYCGKIKHKTDLYQGQHQAIVDDEIFEKVQAQLRENNFNRSNRLPSKHGGLLKGLIRCPNCNVAMVHNMTKRNAIVYRYYTCIRAIKRGRQSCKHPSLPAGEIEAAVVDQVREISRDTKLRDEIIRQAMLATQQGRSELESHHVQLTRQLTRDHGEIRELALEQNPSSSLAHRIADIQDRIAKAELELAKVNRQLHDLDKQQMTTEEIQEAFIDFDRIWDALTAREQSQLLALLVSKVEFDQSDCTIAITFHASGIETLEQQSQEV

SEQ ID NO: 6817 - protein, 547 aa, unidentified
  source 1..547: note = uncultivated organism
MKVAIYTRVSTEDQAREGYSIEVQREYLLDHAKRLGLEVYKIYTDDQSGYILDRPGLKEMLKDAKTKKFELIITYKLDRFSRKLKDLLNIVDELEVYGVAYKSATEPFDTTTSAGKLMFQQLGSFAEFERNRIKERVFPGMIKGVQQGNWQGARFAPYGYRYIKEKKLLEVISEEADIVKLIFTMYLANKTTGEITEYLYLKGYKTRCGGKFYTKLVRDILRSQFYLGKLVWNKKHYDLKQTTKTRIGYRSVKNDPSKVIVSQGRHKPLICQEDFDIVQKKMDANRKGVLYRTNVFEYPITGILYCAKCGHRYQGTSNTSNHKTKKRKRWYKCSCMMHRHVKCTNPNIKAEDIEPKILDIVKKILSHKDIVNGRLDNIVKAHVYLNNSEIQVNLDNLNEALRVNLSKQSKLNDSYMENLIGIEIYKDKVSLLREEENMIKGEIAKAKIRLIEKEQSEAYLRILNLAIANFDESSRKMDLIQKKEMLRLIFKSVEINDGQIVSVRLYQPFQKIYEEMLKECNMLMEKEMTTEGQQDQEVCILLPSVAR

SEQ ID NO: 6818 - protein, 534 aa, unidentified
  source 1..534: note = uncultivated organism
MRKIRCAIYTRKSTEEGLEQDFNSLDAQRETCEAYIKSQKNEGWILLEKQYNDGGYSGGTMERPAFKELLQDIKEDKIDIVVVYKVDRLTRSLMDFSKIIDIFDKHQASFVSITQHFNTTTSMGRLTLNILLSFAQFEREVTGERIRDKFAVSKKKGLWMGGVVPLGYDKDNRTLKINEKDSLKIKLIFNKYLEFKSVSKLMQYLKDNKIKTKSGKIFSKGNLYYILKNKIYTGKIVHKQKEYNGEHPAIIKPPLFEEVQSILSLNAIECTSKNTSYSFLKGLLYDDKENIMSPSHSNTRKKKYRYYVSQAILGLNKEKSDSVTKIPALEIEKIVQDAITVFLKNTNQIQVYLATLDIKQEMAIIKYLENTETFEPLFIRALIFKVILYTDRIQIIIKKNALIPVLLSMVYKSKLKISCCEEHTEFISFDKKIKIARTPTKGKILIIPADSKIQKYNLTLIKALTRCYYWHGLLQKGLCKTITDIQRFENMKDKKYIRQIMSLRFLPSNIQEDILNGTQDVDLSLRKLFKNVLV

SEQ ID NO: 6819 - protein, 509 aa, unidentified
  source 1..509: note = uncultivated organism
MDPTNRMARAYVRVSTEEQGQSGYSLAAQQERIEQFCKSNGYNTVKVYVDDGLSAKDLNRPAFKRMMAEAQPGDIIVSYKLDRLTRSVRDLYELWTEWEKRNLYYRSVTEQFDTTSPTGRVMMSLVAVFAQWEREMIAERTAFGKQKKASLGEWGGGRPPFGYALEPSERIKGGRQLMQLVPDPKTAHLVIAIFKRYLEGQGVRAIATWLNEELGARSSQGRLFDSVKVGRILQNPMYTGVIQHKGQEVPSSHDPLISRTLYDQVQRTFDARKLVPPRQATGEYVLSGIARCGVCGGAIGVMKMSKRGRQAGQYFYRCKNWETARGCGGKDIPSLTSTPGPLMEQRLVETVAALGEPGRLENYYRALEERHKRDVGLTEAEIERVRADLEETQATIARWDRLYGTGKLEMEDYLNHVGPAKERRMVLREQLEDILSKPAPPSKEALAGIVLTFPSVWADAQPAERKELLRNFVDAFRATVCLYPGQRLEVYPAGEWRPPGLASPESDAI

SEQ ID NO: 6820 - protein, 524 aa, unidentified
  source 1..524: note = uncultivated organism
MKITDITSTQKAEQNNRLAAYCRVSSDSEDQLHSFAAQVCYYSNYEKQHPEFKLVGVYADEGLSGTSMKNRSELQRLIHDCEQGKIDRVITKSVSRFARNTHDLLQTIRLLKSLGVTVLFEEQGIDTAKLNSEMFLTFPGIVAQQESESISGNMRWSYKKRMEAGEFNTCSPAYGFDLVDGKLIINENEAAVIRRIFDMYLQGVGKERIADILNEEGVPKKRDTKRWNQRMVSYILVNERYMGDALLQKFYTTDTLPFKKRPNKGEKAKYYVEDAGPAIVSREVFEAAKALSKKRACLTGHNANHTLTQMLFCPKCNRAFRRLTVRGKQYWISSITEQSECICKNQRLMETGVYGAFTLMVYKLKDNRNLIADLIHQLERLESITGDSDFISEIDAEIAQLSVQKHVITKLYNNGVLNTVDYTGQSSDIDNRISDLRTKRRKKLSENPDDELKDELKTLNHLIDKYEPSPQIDKNLFEQIVKRITVINNSTIKFKLLGDIELEETINEKARCRSHENQGDTIRI

SEQ ID NO: 6821 - protein, 575 aa, unidentified
  source 1..575: note = uncultivated organism
MNKVRCAIYTRKSSEEGLDQAFNSLDTQREAGLDYVKSQKHEGWEAIDDTYDDGGFSGGTMKRPALEQLLEDIDRGRIDVVVVYKVDRLSRSLGDFARMMQLFDEKKVSFVSVTQQFNTTTSMGRLTLNMLLSFAQFEREVAGERIRDKIAATKKQGYWVCGQPPLGYRLQREDEERGLFIIPEEAETVRKVFERFVELKSPLAVASELSEQGFTTKRWVSSTERVHGGKPLTQKYIHSVLTNPTYIGKVTHTRNGETTIYDGRHEPIIDQATWDDVQRLINTKDRNTLHRWSQPHLLKGKLRTGDGFAISPSSTHRPLTKRGVTSKGRGQKRLVRYYVSQKAIKHGFKSCPIKSINAEHLDDLVRGITLNYVDCQPLNAQQPEVRDHWIRNLIQQVVLTENRLSIEIDQDQLGAVRSHNFTPAAEPSQQHPHCLREPKCEDDDSIIRLTLDIQFKKIDGRRLLLSPDGNDLVIPARPEPKLHIVEAIGLAYRWHDELTTSGEHIKPFTENRGIARTRIMKLLPLINLGPEILHHALAGTLAPSMTLEDLLEAARHLDWTHQARSLGLDRVAVAA

SEQ ID NO: 6822 - protein, 576 aa, unidentified
  source 1..576: note = uncultivated organism
MRKNNGLIAIYSRKSKFTGKGESIGNQVELCREHVRNLYGDEAAESCVVFEDEGFSGGNLKRPSFQKMLEGVRKKQFKAIVVYRLDRISRNISDFTGLIDELTRLDVSFVSIREQFDTSTPMGRAMMYIISVFSQLERETIAERIRDNMHELAKTGRWLGGNTPTGYESQSVTNVTVDGKARKACHLKLIEEEAQIVQTIFELYAQTDSLSAVETELLRRRAKTKRGNDFTRFSIKNILQNPVYMIADEDARNYLTEHEVYLFAGDADFDGVRGMMVYNRTDQEKGKAAVILPMNEWIVAVGKHPGLIPGRQWVAVQNSLERNKSKSYRKPRNNEALLTGLLFCSCGERMYPKLSKRVMASGEPVCTYVCKMKERSHKERCDRRNANGNALDAAIIQHIKSLTEQDSIFLNQMERSRKFYTGSREQYESQLAQLREELAGNEKILAGLIDSMAMLEGSPVKSKVVSRMEQLSDANRQIENRIRELVGLTDQQSICDSEFNVLRQMLVMFRTSIDQMTVEEKRTAIRTVVRKVIWDGQNAHVVLFGADEREIEYPNLGEVLGEASQTPETSWGEDSK

SEQ ID NO: 6823 - protein, 527 aa, unidentified
  source 1..527: note = uncultivated organism
MKRTAIYARISDDAEGKALGVTRQIKECQDLVQRMGWLLDGDPYVDNDVSATRSKTRPAYERLLADIDAGKVDAVVVWALDRLHRRPIELETFIALVERKGVALANVSGSVDIGTADGQMFARVMGAVARREAQAIGDRVKSKQTQLREAGLPFSGGIRCYGWEADRRTPIEAEQAEIAKMVDWLLAGRSVHSLVHDLNDREVPTVSQWMQANPSKRRSPDQKPIQGRPWTNTSVKALLIRPRLAGLLTYQGEIVGKGAWAPVIDRETFDRLQVALTHRSPATRTAHRGRKHLLSGIAVCGVCGAGLQCGSSPDGQAKHRRYRCPAVSAGTTRGSGVLHGGRNMIALDAHVVESLLVALDVMATAPAKGEPLPDPGPTIDALRDRLNVAADQFADGVITAEQLQRISSRLRPQIEVLDVSRPDVGAESLMDWYLGSRDPDDARDAFAALPLEDQRRVLVTTLGPQGSIVVHPAAVLNHGLDTTTIAITWALGTPADPQIRAGAYKDLRAAEALHDGPAATLGEPVSA

SEQ ID NO: 6824 - protein, 541 aa, unidentified
  source 1..541: note = uncultivated organism
MPKINCAIYTRKSTEHGLDMEFNSLQNQEESCKAYILSQAFNGWEYVKTYSDGGISGGTMERPGLQALLNDIREGDIQVVVVYKVDRLSRSIIDFHKMMQEFDKHGCNFVSITQSFDTSNSMGKLTLNMLLSFAQFEREVSAERVRDKIAASKAKGLWMGGTPPLGYDLKDKQLIPNPKEAELVNLIFNKYLELENMLAVAEWLNQNGYHTKCWVPHGGQLRGGKAFQKSSIQRILTNPVYIGKVAHHAKNKVYVGRHKPIVPKNIWEAVQDTIRRRITNPHAFSHYQTHQTVLAGKLYDDKGRVFRLTSSNKKGKKFLYYYNGVGGRYLPVEQLDSFVLKTLKITDFDDLEPLADREGLTDPQMQKWIVKVVCQSTDKTHYLSIFLDEKQIKTDLSACSRISGQAESRVLSAEKLDGKLYVRNSFVVDNVSSVKLQHGTARNILTGRQLNESLVRGLSRGWQLKRLLEKGKSLRECEAASGMNKRTIARYLNLCYLSPKILADILEYRNPRNMTLKELMTLGEGETGFREQEKAWISIIK

SEQ ID NO: 6825 - protein, 512 aa, unidentified
  source 1..512: note = uncultivated organism
MRDEKRDPPRIAFYTRISTDEDHQKYSLGAQKERLEAFCKAQWDDEWKLHKVYRDTESGTHMNRPGLEEMLYDAETQAFNTLLVFRVDRLSRKVRELAQMVDELTKNGVVLKSITEPFDTANAAGKMMLQMLGVFAEFEHATIVERTKVGMEKKAKGGNFVGGNVPYGFTLDPEKGLVIHEEEALIVRKMFKMYALGKEGASAICNQLNEAGHRNRNGRKWGRRVVLYMLKNPVYVGKIRWREVLYEGQHDPLVSEVLFEKANEVLQERHEDLKGRQWHNGDDRLLTGVIKCARCKSHMFGGGGYKKGVHVPYYVCSKRLNDHDCEQDYVRAELLETAVTEDIKAMFRDEQFMARIHAEANKRLGTEKPILEKEIGKVEAQAAKTQAAMDRYFEAFEAGTLTPELCNEKVRDLRARLEELEGEKRDLEARRERLELPAVDREMLASLVENFERVMAEGPAPQKKHLLHRLVKKVLVQDRRTVEVWYGLPNPQRFEDWNKWLRGWDSNPRPSG

SEQ ID NO: 6826 - protein, 510 aa, unidentified
  source 1..510: note = uncultivated organism
MKTITEITTKQPAAAILRLAPYCRVSSDSEDQRHSFAAQVKYYTEYTAAHPEYELVDIYADEGITGTEMKKRDDFNRLLRDCRKRKIDRVITKTVSRFARNTAELLTVVRALKELGVSVYFEEQGIDTETLDLEMILTFPGMAAQKESETISENMRWSYRKRMETGEFNCCRAAYGYSLIDGELQITEAEAKVVRRIFHLYLQGCGKQAIANQLNTEGVPKRYGQKTWYLSAIDYVLNNERYMGDSLLQKSYTTETLPFRKKRNHGEKAQYYVENSNPAIISRETYQATQELQKRRFTDRHVPKNQYPFSGMLKCPVCGHNYRRQAANGTAYWLCSYKASGRTECGCERISEQAVMEAFTRMSDKLTDNREELLGDLIRQLEKLQSRTSGSGEKVYELNRQIADINAQSLVVAQLHGSGILNNAEYAVQSGELNRRASELRSERRRILMEDEDNEVIESLKALNDTIADYTPTGRFDEELFGQIVESVTVISGNVLRFCLAGGLALTEKI

SEQ ID NO: 6827 - protein, 510 aa, unidentified
  source 1..510: note = uncultivated organism
MASNEKYTILYGRLSQEDTQKTNKTDDSNSIQNQKLLLEKYAAEKGFTNTLFLYDDGYSGTNFNRPGWQQVMELMENGQVETLIVKDLSRLGRDQIGTAFYFQMYFPKHQVRYISVTEGFDTAEAGGTSALFPFLTAANDFYTADISHKVRTALTTRKKEGKFIGAAPPLGYRKDPAVQGHLVVEPEGARTVREIFQMYLRLGSVIGVAKALTERGTPTPSQQKNAPVQQKRFAGTWNDTMVRRILSNPTYAGHLTQNRRTKTNYKLEQRVDLPPEQWITVQDTHEAIIDQATFDRVQEMLAVRSYSHGERSGHLLTGLAYCADCGSPMTYVRGGERRVYMVCQGYRKGGRLRLCTSHCVREDAVIEAVRSQLEGLARQLDAETLERPGEPEQEKRQLKRQAESLERKLEQCRRVSGSLYRDKEAGILTGEEFRELFEDNRAQRAQLEARLEELRGRMERETDRDAWLDSVRELLRFETLDRETVLALVERVEIGKDKEIGITFRFRQPT

SEQ ID NO: 6828 - protein, 519 aa, unidentified
  source 1..519: note = uncultivated organism
MVAIYTRQSVERTDSISVEQQAQLCRDALPAGEAQACKVYTDKGFSGKNIDRPALQRLLADAEAGQIEKILVYRLDRISRSVHDFTGLCASLSARGVHFQSVTEGITLDDTPSGTVMAQIMMVFAQFERETIQRRVTDNYFARAKTGMYLGGRPPFGFDKGETVVNGKRTACYVANPPQAALMVTLYERYVQDDETLGSLVRWLNANGHCTVRGGGWSTLPLGRLLRNPAFVRADAAVYRYLQDKGATMNDPIASYNQHHGCYCYTHRNSAPPDKRPTRRKFTDLSGSFVTLAPHEGIVDAALWLDAQHKLDQNRALKNSGSGSHSWLSGRMKCKKCGYAITVVNKPAGMRGHYINCGGHKRGNAVCPGRSRVITLEEIEGAVEAQLLYFLTSYRAVPIPAPRRRSAQVNQLEIEIDRREKEVAQLSHNLTQILEPDVVHIIAGQIHTANEQLVALQAQRDTLLHSETCTDLEPYFEAMLTEWPGYTIEEKKRIAQAVLERVWVDDDTIEVVFRAAYGA

SEQ ID NO: 6829 - protein, 535 aa, unidentified
  source 1..535: note = uncultivated organism
MRTGIYCRVSSEEQQEKGTIQNQIEFGEKYCDLHQLEIVEWYKDDGVTGTIPLEDREEGKKLLEDARNKKLDLLLIYRLDRLGRSARIILNSVYELEQCGVKIRSMTEPFDTGDPNGRFLLTVLAGVADLERETILERMWHGANRAAKEGKWLGGIVPYGYLVDEEGYLAVNEAPLPGMEMSEADIVRLIYRLVGEQGMSTIKVADYLNALGVPTSYSKDNRQVKKGKRKVNTAGIWRPGRIGSIVKNTTYKGVHYYGKRSKKEREPVPRETPAIVSEELWEKGRQALKKNQLEAMKNSKREYLLRGLIKCGTCGLTYHGTYYGKKGKEAYYVCNGKRPYNGPLDGKCTSKNIPAEWIENLVWEDCVNFILNPKEAITKLAESIEEKRARKENYEAEIKAVKNALQEKEKEKDSILELFRRKIISINDVERQMQKITKEANELNLRFEELKEQAEVQTKSEEECNSAEELLQGLQSKISGEVSFKDRREVVLTLIDKIVVDTFIDERNHKKAKIALHYNFVKDVNCTDMELTIPP

SEQ ID NO: 6830 - protein, 549 aa, unidentified
  source 1..549: note = uncultivated organism
MGKQTVAQTVKTKFRVWRIAIYIRLSKEDSRCLDESESVTNQRTIIEDHIAGFNDGDEYIIVDEYVDDGISGTTDDERDDFQRMLADIKRGRVNCVIVKDLARSFRNYSDQGYYLDDWFPRYNVRFISLFHQPLDSYKEPQTMRSIAVPIQGVLNENHCAETSDKVREVFDMKRRNGEHIGSFAVYGYLKDPNDKNTLIVDEEAAGVVRDVFRMFLDGMSKNAIVRHLNDHGVLCPAAYKRERLGLNYQNPSFDPGKRPLWCAMTVGGILKNRMYCGDMVQGRYRMKSYKIHVQEAVPQDEWYVVENTHEAIIDRETFEKVQLHLKRNTRTAPQQRTPYLFSGFLKCADCEKSMTRSKVGNAVYYYCRTYKDQSKSACTKHTIKHIQLEAAVLYAIRQQVYLAVDFSKTLEQLGKVPLVKSRSKKLHDAIEQKERELAKIVRYKQSIYQDWKDGEITHSDYRHMKEDYEQQAEVLNQILVRLKEEQREAENGIDTKNSFLETFQQYQNIETLTRDILIELVDHINVYEGGCISIVFRFADDLPRSGAFT

SEQ ID NO: 6831 - protein, 532 aa, unidentified
  source 1..532: note = uncultivated organism
MVRENINKRFQVAIYARVSTDKQAKGGYSLDAQIEKGIEFCTRNNYTYKVFVEAGKSAAKEDLNNRPLLREILDLAAAGKIELIYATEQDRLSRNPVTLCLIQETLRKCGVKVATTNKIFDMGDTEDEFMSSLFGILAKKENTDRSKRSMRAREEAAKQKKWVGGVTPYGYSKRDSKIREERNLLEINPEEANVVRMIYGWSLEGMGSNKIALKLNAMGIPTRFTSQGRKGLVFKWKAGTVLQMLKKSRYMGRSVFNGHKISTPVIISEEMWNKVQVNLSKNYNNAERNTQRFYLLQHLLVCNKCGLRFFGMIKEKKGMRCYCCLSKRPNPEPRFCGTKNLHIDKINNLVWSEVSSIVKNSDKLKEAIKDQKDNSWVDATLHETESSLNAKAIQAKKEELDRLMELYTKSKTFSVEDLDKKAGTIKSELEALEEMKQKLDARAFQATEIKQKMKKVEDIMSSVAQRIDSFTDQEKYDFLHLFINRILVDYDPTVGHTIVIEGAIPLFDDKKHSGSDLSVSFKSKATRIPVKR

SEQ ID NO: 6832 - protein, 532 aa, unidentified
  source 1..532: note = uncultivated organism
MKAESKNVVIYARFSSSKQNETSIEAQLRVCYEYCKYNNFKVIGEYIDRAKSARTDNRPDFKRMINDSKKRQFHGIVCYQLDRFSRSRYDSATYKSELEKNGVKVYSAKENINDDASGILTESVLEGMAEYYSKELSQKVDRNMRLNAMKGYFNGGFAPLGYKVVTVNCGTYQKKRLEIDPITSKAVKKVFELRADETKIEHIIDILNHDGYKNINGKPFTRNSLQTMLKNKRYIGTNTYNKEEFPNTIPAIIDKELFDKVQKVIDKNKRVPAKSKAKEEYLLTTKLICDCCGEKMKGISGKSKNGTIYRYYTCKSHKEGKKKCNRKNINKDYIEEVIIKKCKEILNDENIAIIAKQVYKTCQKENNKNLIIKEYEAKIKENEKAINNLLLAMEKGANVDLINERIIAKRKELEETKLMLAREKNKLINIDEQQIRFFLSQLKDGNINDIAYKKKLINIFVNEIHLTEDEIIIIFNVSKQKITLSIPTIDNVKNTYLNTHTECLYNNVLVSQEGLEPPTPCLEGMCSIQLSY

SEQ ID NO: 6833 - protein, 527 aa, unidentified
  source 1..527: note = uncultivated organism
MSRASLAIAPDPAGSAGPVRVATYTRISTDEERQPNSLEAQRVRLGAFVDSQPDWQINLRYEDQFTGTVIDRPALSRLLRDAKRGRFDVLLVYRVDRLARSIRGLAQIVDELDQAGVIFRSATEPFDTGTPAGRMMVQMLGVFAEFERALIVERILAGLERKAARGGWCGGRRPYGYDIAADRDHLERNPTEAPLVPVIFDHYVNRQLGSSATAKWLNTNGYRTKNGRLWNHGSVLTVIRNRAYIGEIYYRGSWYPAPHEPIVPRELFDRAQTILKERGEDQSQRRSNASEYLLTSRVRCGRCGQAYIGTAAHGRNGRYTYNTCFTRHRYGTAHCANDRLPAEKLEQAVTRQLWKVLNDKTLLAAALDHAHAQLAHRDGEHEDELTSVQRKLADARAAMDRYFQAFEHGTMPEDTCAPRIAALGEQTKALEARASELATLADSEPVQRISSTDLDAIRQRVRAALDDGGPMRVKAILQELTDEIRIDSRDAIEPTFLVPAVRPPSGSMEPTGIEPVTSCLQSRRSPS

SEQ ID NO: 6834 - protein, 620 aa, unidentified
  source 1..620: note = uncultivated organism
MKNTSNVIAIYSRKSKFTGKGESIGNQVELCREYIRTHYGDEAAEKAVVFEDEGFSGGNVNRPAFKKMIAQIERGEFKALVVYRLDRVSRNVSDFSSLIENLNRRDIVFVSIREQFDTATPMGRAMMYIASVFAQLERETIAERIRDNMHELAKTGRWLGGNTPTGYCSESVKSVTVDGKTKKACKLKLIPEEAETVKLIFDLFIKTGSLTLTEAELIQRRVMTKNGNHFTRFSIKSILQNPVYMIADEEAYEFFKLKDADLFSSKEEFDGIHGILAYNRTDQEKGKATVYNPVSDWIVSVGKHHGIIPGKIWVGVQDNLERNKSKSFRRPRRNEALLTGLLFCSCGNRMYPKLSKRKTADGDIIYTYVCKMKERSKKDLCNKRNANGNTLDLAVIEKIKQLADEKSDFVGQLEKSKIFYTGNREQYEQKLSTMKKEKADLEKKVSSLIDTLAELDDNSAKKSIVARINDMNTEIDKISQGIDEMISLTAEHAFSDIEFDVLRQMLGVFKNTIDDMSYEQKRAAIQSIVRRVIWDGENAHVILFGSQDGDIELPDITPYIKHIEIDTDEDEELIEFSDVDYDEDTTEDFRSQTKTDLCEDSKPNINAFSNSKKNNRRCLY

SEQ ID NO: 6835 - protein, 514 aa, unidentified
  source 1..514: note = uncultivated organism
MAIAPAPTICGLYTRVSTRNQADTEYSSLETQREKLEAYCKSQEQYVVYRVYEDAGFSADTMNRPALKELLQDIRAGRITCVLAYKIDRLTRSVKDFHVLMDLFDRHGAKFVSITQSLDTHHPMGRLLRNILLDFAQFEREMTADRTRDKMQQRATKGLWNGGNIPFGYQNDDKRLVKHPQESACVQFMFQFFAQDPSLTRLRAELHRRGWYSRSGKPWGKMTIDYILSNPTYQGKVQFNDQVFQGEHEAIVEEGLFHKVQSMAREHTRAETKIQRAFLLKGLLKCSVCQSVMTPHYTQKRRKDQSINRIPYYRCTKTMHQNNAVCTVKALNADAVERQVIEYLSTLSQQAEWVKGTVEELNRDQKEQVRPLEQEAIRLKASLDRLEREIDRLVRGVGQGTVSVQRLEKEMHRQHKEQQGLEAQYQAVQRQIQEHSAREYDSEIVLRNLKDFQRVFAALLPKEQMEVLRCLVRDIVVYPDKLVFNIFELAEVGTSSQQRKGWLPGQDSNLRPAG

SEQ ID NO: 6836 - protein, 595 aa, unidentified
  source 1..595: note = uncultivated organism
MTTDALKLLQDPRRFAIYSRKSKFTEKGDSVKNQIDLCRKYILEKYEGTREEDILVYEDEGFSGGNTNRPHFKEMMRAVKKNELKAIVVYRLDRISRSISDFSEMYTQLTHMDVAFISESEEFDTSTPMGRAMMHIATVFAQLERETTALRIRDNMLELAKTGRWLGGMTPTGYQSVGEERVTIDGKKRRLFKLDIISEEADTVRLIFRLFLEMNSLTRTETYLLQNHIVTKNAREYTRFSIKNILQNPVYMIADEDAWDYFNRLGVELFAEKGDFDGTRGVIAYNKTNQKASKSHEIRDIGEWIIAVGKHSGLVSGADWAKAQRLLEQNSSKSYRKPRSHVALLSGLLFCGNCGSFMRPKMTRRINAAGETVYTYLCETKEKSRRKNCDVKTVNGNTLDSGILEKIQRLPENRFEFIRALERTKQDIQDGRQETEAELDNLRKNLAELQKEIAGLVGVLAKAENTPAYTHILNQINELDGKEKQIRRRMEELEAVTRQNACSDKDFNTFRQRLASFDNAVNIMSVEQKRAALRVLVRRIEWDGEDMHVYLSGAREGEMPLSGLKGGKGGKSSYTGDSGILPTTEKKEPLREDSE

SEQ ID NO: 6837 - protein, 621 aa, unidentified
  source 1..621: note = uncultivated organism
MKVWLDCKNNVTMIKADNDIRSRKIRQTNKAKLRVCAYCRVSTDTDEQAMSYQNQVEYYTDYIKKNKDKWDMVDIYADEAITGTMENKRPDFQRMIQDCKDGKIDMIITKSIARFARNTVDTLKNVRMLKDMQVAVFFESENIDTLTMNGELLLTVLASVAQQEVENTSANVKKGLKMKMSRGEIVGNSGCLGYNYDSDEKKLTVNEDEREVVKTIFKMYLEGYGAWTIKHYLEDNKIPTHRGDFLWSETGILYILKNPVYKGDLLQGKTFTVDPISKRRLNNFGEEDKYIAVDHHEAIITRDMWDAVQKLRIEKNYGGNKYSKGDKRTVYTNKYTFSSMIECGFCHANLSRRSWNCGTPSSKVIWQCVRATKNGKKFCPHSKGLPEKDIERAFVESFKMMQGNRDELINGVLEKAKKAMSEYDTSAQIKKRENDIMLMQKKIRKITDLFTDDSIENKQVFVEKYNELNAELQRLEAELDELKDIKKSESSLEIRINDLNDCLDNFDTDVFDPLVFKAIIDKVIVGGYDDDGTENPYLITFVYKTGFNAVADAKKICSSSKADTCRDYSRTISDNYVELLKFWLFSDHAVFTTTSNNEERKEISKGYLVMVVISKRSLENT

SEQ ID NO: 6838 - protein, 516 aa, unidentified
  source 1..516: note = uncultivated organism
MVVCIATEGGENVAKKQTSGNLALEQQRVIVIPAHDEIIARKLRVAAYARVSSSSEDQLNSYRVQNQYYSELISGNPDWEMVDIYADEGITGTSVEKREDFQRMMQDCRKGKIDRILVKSISRFARNTKDCLAAVRELKELGVSVLFEEQGIDTSKVSSEMVTAIMASLAQKGSESISGNVRWGVQKRMQDGTYLPSSLPFGYTMIEKSIQIDETQAEIVREIYTAYLAGKNVDEIAEKLNQTQAGSRRWYNTTIRYMLSNERYIGDSLWQKTYATDTLPRKQIKNTGACLQYYVEGTHPAIIAKSTYEAVQLLRAERKKADRASFTDTSKAFRKRICCGVCGTPYQRKFIADNTYWVCRLHNQSKDKCLNQAVPEKQITAAFFHLYYKLKHHGGPIFAQMLSNLQKIRYSRMLWSEDVISLNKKISDILSQVQFLIQLQQAGGVDPDSERQFHIEADYFIDATGDGTVSAKAGVPFSVGNGNHETLGNSILYITPTICHILRRSSAAAGASSTNG

SEQ ID NO: 6839 - protein, 550 aa, unidentified
  source 1..550: note = uncultivated organism
MNKENGAIRVATYTRVSTQEQAQEGTSLDFQDSQLTTLCQLQRWSIINSYTDPGYSGKDGSRPGLERLLADAKIRLFDKVVVYKLDRLARNLRLLLEIEQKFKAYGVTITSVKESVDTSTGTGKMVFQMFGMIAEWERDAIIERTKSGRLQRYKDGCWAGGSVIFGYAYNKATKKLIIDESEARIVRRIYSEYRDGKMLHGISEGLNKDKIPGRTKHSLGWRQNVIRDILVNPMYRGTQIVNRHASISNINKIDLDNTIQISVPAIVDEQTWQIAQERLKNNKHVKPIKQGEFLLQGMISCGLCGYAYRAARVHKARYYYCRGKMKDHHLDGSPRCKSNYLNAEWLEKQVWHRVEEIINDPNRLFEVLKNTIENLRLREADLNARIKPIEERLAEIASQKAKLADDWVVRHMNNDKFKELKDNLDREESRIRALKAEIDPSQLADLESTRGVLYFWEDQIKSMAWNTENEDGSMMRLVNGPHQIALKVVGFEDKTLSDTLGFPASKRELLDKLQVKLVVFSDRIEVNGLFPIQPIDIQSLVSTKGDKRGF

SEQ ID NO: 6840 - protein, 525 aa, unidentified
  source 1..525: note = uncultivated organism
MARKVTTIPATLNRYTATPVHMYRKRRVAGYARVSTDYEEQATSYEAQVDYYTNYIEDREDWEFVGIYTDEGISATNTKYRDGFKRMVSDALDGKIDLIVTKSVSRFARNTVDSLTTVRKLKDKGVEVYFEKENIWTLDSKGELLITIMSSLAQEESRSISENSTWGQRKRFADGKVSVAYSHFLGYDKGPDGKMVVNYEEAETVKLLYKLYLSGLSMSAVAKELTKRGLKTPYGKDKWRIGAVRGILTNEKYKGDALLQKEYTVDFLTKKVKRNEGEVPQYYVENDHEAIISPAVFDMVQNEIEKRKKEITRYSGVSIFSNKIKCGDCGGWYGCKVWHSGDKYRKVIYQCNHKFKGEKKCGTPHLTENEIKEWFVIAVNKLLADKEEIIQNLERIKEALCDTAKMKEEQEHLQERVAVAIETMQEYISQNARAPLNQEQYEKKYSSMSEQYEGLKAQYDRAAEKISSNESKMARWDHFIEELKKAGFLITKFDERLWSGLMTCITVHSKEDIRFMFKDGTEICI

SEQ ID NO: 6841 - protein, 534 aa, unidentified
  source 1..534: note = uncultivated organism
MPADPWADETLRDLGWTDTELQELRGLQARESQLPVTAKRVLLSIRLSVLTEETTSPVRQELDLYRLAIERESRVAGVARDLGVSATKVPPWARPQLGDWINNRSPEFDEILFWKLDRFVRRVSDLHLMIEWCKEYEKTLAAKMDPIDLSTEFGQFLVTIIAGMARIEAANTGVRVESLWTFARTATRWVIGKPVYGYTTDKDENGNRQLVVDPVKARVLHWVYRMLKRGYSLYRICKILNRTDFLPPNKGEWTSGNLKVILINPALMGYRVYRGKNHKQGESPHISYDTDGSPIVLAKGIFTPEQFDEIQGILKARANKGKKQMNKRTQYLDVIKCGKCGRNWYDTTSQYTKKDKSKTVTHKLRCASYQDGGSCGMPTVRPPQKVYTMLRDAAFEELGDYEVVHREYARGSDNLAKKLDLEKRISHYMEELEPGGMYSAAGYMRDNAKETLASLGRQLSEIDPESTKDRWTYVSKGVTYRSHWEDKGDDQIEEDLRRGGITFVIHEGYAELNVPDDIKDRLVHKQDFFELKKI

SEQ ID NO: 6842 - protein, 662 aa, unidentified
  source 1..662: note = uncultivated organism
MKGSNTMNTRATAAYVRVSRDSQETKRQEDRIRAAKIPIVHWFRDDVGKNPRDLPLKRPEFQRMLKAVEAGLIDKIIVDRQDRFGVANAHQWGKYISLLKENGTALIDADGKVLSGEDDSAVLIGTIGALTSTREQKEKAHRNITAKVGKAKEGEYQGGLPPYGFDVVCFGADGKEKWRTVYIRWQRPRRGSNGQGDYRRLKVYPNGKQEHFDGKDNSPSKDPTDKMFIRPSMMKDRVKVAGKIFGWYADESISPRQIAVRLDELGVDPVSGKAWDKIKIRQTLSNPAYHGYPCWNKNGMARFVEYVDGKFQEVKDKKGKKRPQSDYVMPSKPLYKPLVPDKTWDKVQAKLAKSSEEFRAIPKRSPDTANLYLRPFLICAHCGEKMSASTGRSTDYLQPNYFCSTYGRYGTNNPTGCHCHRVQHEILERIVKAYLAETAPKIAALLEATDKGDLEAVRPLLDGLGGFGLRYEAASAGTDLLDFITKVGDKKEVSRLTKQRKGIEEIYGVLYERLRPQWESEIAEKETALDKMLEDYRGLSPTLRERLNAKMEALQAEIVALKLRLADLRTPWANLIAELTAREKAVNEAVKALGKEKNGRQKTAALEGVIKEIRCTFRHAIRKPTGKNGKVNNGKSYLETVDIVSVSGDSVSFTDGIMPGQG

SEQ ID NO: 6843 - protein, 521 aa, unidentified
  source 1..521: note = uncultivated organism
MSRRKPPTQSANPKVRCAIYTRKSTDEGLDQEFNSLDAQREAAEAYIRSQAGEGWILVPDRYDDGGFTGGNLDRPALKRLLADIEAGKVDCVVVYKVDRLSRSLLDFARLMETFERHRVSFVSVTQQFNTATSMGRLVLNVLLSFAQFEREIIGERIRDKIAATRRKGKWTGGTPILGYDVDRSNGRPRLVVNAQEAARVREIFRLYLSLGSLLPVVDELARRGWQNKTWKTRRGQLKGGRPFEKGSLYALLTNPLYVGKIRYKGELHQGEHEPIVDGEVFQQVQATLRHHGRSGGVAVRNKHGALLRGLLYCKACGRAMTHTFTCKGQRRYRYYTCTRAIQNGRKACSSPSLPAGEIERVVMEEIRAIVRDRTLRAEVLRQAQELFEDERAELATEERGLKRELAWHHAELRRVAGDATVPATDRMAELHERIAQCETRLREVQRELQEHEQDRLTTADVDAALADFDGVWDALSTREQVQLVALLVARVEFDAVQGTVAVSFHPMAIKALARKQIGDVK

SEQ ID NO: 6844 - protein, 559 aa, unidentified
  source 1..559: note = uncultivated organism
MRDPVRPSERRCAIYTRKSSEEGLEQDFNSLHAQREACDAYIKSQKHEGWRALSAHYDDGGYSGGSMERPALQRLLDDIKAKRIDIVVVYKVDRLTRSLADFAKIVEVFDASGVSFVSVTQSFNTTSSMGRLTLNVLLSFAQFEREVTGERIRDKIAASKKKGLWMGGFVPFGYRAKDRTLAIDEGEAATVRLIFHRYRELGTVSALEADIAELNLRTRAFTSVSSNRAWGDRPFSRGHLYKMLSNPIYAGKIVHNDKQYDGQHQAIIDKKAFAAVQAQLAANNRQHRTRERAKEPNLLAGLLVDANGTRLTSSHTVKGGKRYRYYAGVRLEGGQSKSWRVPAPELEAAVIGEMQRFLGDRQRIASALKRSRLQMRELSETLRIANDLRAQLDAFASRRETALKLIKRVVVSDSELVIELKLGVLISEASGPTRTATHRLTIPIELGRQNGGAIVLASASDRGVAADPALIKALARGFAWFEELATGRADTVTAIAKREHVTDRYVSQLIELAFVDARIVQRVLTGAQRAAISTTRLVFKTNLPLMWSDQRGVILASPR

SEQ ID NO: 6845 - protein, 521 aa, unidentified
  source 1..521: note = uncultivated organism
MKIAIYSRKSKFTGKGESIENQINKCRDFIQFKFETDPDNALIFIDEGFSGKNENRPQYQLMISKVKSGEIDSIVIYQLNRLGRNARDIHNTMQMCEDLNTVIYSATEGFDSSTSFGRAIIGILASLAQLEREQLAERIKDNMYTLAKMGRWLGGQSPLGFDGVREYYIDESGKERSVTQLKRNEDELKIVKAIYKKYLAEKSLSQVSKWTLANNFKGKNGGNIDKAAIDVILKNPVYVKSDTKLFEYLSHNNCEICGTPNGNGMLRYGKGNENIVSVGRHKGVIDSEDWIEVQEIMKKNTEKAPSIGKSKTALLTGILKCSCGSNMQMRYGPKRKDGTKLHYYVCTMKINSGGTRCSSKNLNGKLLEEKLMKYLQNFNINKLLEELGNSINKSHELESKISVNSIYNDIESCNKSIQNLLNSLKEAPNQSIRKIILSEIEGVEKNIADLEQKKSALLNDSSQLSLAQADILKIVSLLETFNNAYDNMNFVEKKKCLNELLSSITYDGEKLHIEFNVKKTR

SEQ ID NO: 6846 - protein, 516 aa, unidentified
  source 1..516: note = uncultivated organism
MATKPEKMIRCAIYTRKSTEHGLELEFNSLHAQREACEAYIKSQVHEGWTALSKRYDDPAYSGGNLERPAVQLLLKDIDAGLIDVVVVYKIDRLTRSLTDFAKLVELFDKKIISFVAVTQQFNTTTSMGRLTLNVLLSFAQFERELSSERVRDKVAASRKKGKWTGGSVPLGYDTKDKKLVVNLAEANTVRMIFARYLALKSFRPLINQLKDKGIITKKRAITGKIVGGIPFTCGPLAYLLKNRTYLGETGHKERWYPGEHEAIIDPALFDAVQSLLKSNSVTRHQQRSDNTSLLAGLLFDDRGNRMSPSFTTKRGVRYRSYVSTAVLTGRRNEAGSVTRVSAPELETTIVAALRKRFTNPDNLTDADLICARIQRVALGATKAVITVKTNNTTENLIELSRPHPPTSPRVRIETDDCQLGNQPDIGLLHALARAHLWLKALTDGTYNSIDELANITKWNPKVVRKVLRLAFLAPDIAKTILVGSQPKSLTLSELQGVAAYSWDEQRRLLRFPAAV

SEQ ID NO: 6847 - protein, 510 aa, unidentified
  source 1..510: note = uncultivated organism
MANSRSNMEGRPHIRCAIYTRKSVTMGLEQEFSSLDAQREAAEAYIKSQASEGWSMIPEVFSDGGFSGGTIERPALKELLAAVRRGEVDCIVVYKVDRLSRSLLDFTRIMEVLEQHNCNFVSVTQQLNTTNSMGRLTLNILLSFAQFEREIISERTRDKIIAARKKGKWTGGCPMLGYDIGPDKKLYVNPQEARVVKRIFDLYIRHEATLRVVAECKKQGWSAKAWTTRSGKQMGGKPFNKSRIYAILTNPIYTGKVRVGKLTAEGEHEAIIDEETFDKVRTILTRNNQNGGVKVRNKHGALLKGLLYDARSGYAMAHTFTKKGNKLYRYYVNVMAAKEGWNACETTSIPANEVEAFVFQQVRCIGQDRKLQEAVLDEVMHDFEVRKRDLEAERKRTFKRLSKLSEDIKESANCEDASRLRYLREKSAQTEEHLNRTIEEISQIDSEKLNQSEVITAMNNFDPCWEQMASRERCRFLELIIEKVLVDTTAGKLAIQFRPAGIKTLLTGSN

SEQ ID NO: 6848 - protein, 566 aa, unidentified
  source 1..566: note = uncultivated organism
MTGRAIRCAIYTRKSSEEGLNQSFNSLDAQREACAAYIKSQASEGWLLVHGRYDDGGYSGGNMDRPGLHRLLTDIDNGRIDCVVVYKIDRLTRSLGDFAKIVECFDQRKVTFVSVTQSFNTTTSMGRLTLNVLLSFAQFEREVTAERIRDKFAASRAKGIFMGGNPPLGYDARDRKLIVNESEAKTVRMIFRRYLELGSVAKLREELDAERIKTKVFVSTRGNAIGGGRWYVGPLRHLLRNPVYVGLARHKGNTYAGEHEAIIDKSLFDQVQARLSTSALAWARKRTIEASALLTGLIFDDKGNRMSPQWSIGRNGTKHGYYVSQALLQRRKGCEGSLPRVAARLVDDLVVRCVSGVLSSTADEGDTDNGSSPAVFDAAKVRAAVERVTLGVSEVTLNLKLDRRTVKEMRKKGRDPSLTHCLPPSAVVTEQEHGIQITVPGRLQRRGGAKRVEGWSKSDWSVAKPNFDKTLVAALVRARRWCAMIERGEISSIEALADREGMNRRRVLPLLRIAFLAPDIQAAIVEGRQPVTFNLKRLTELGLPGSWQKQRRLLGLSVSTLWEPLS

SEQ ID NO: 6849 - protein, 534 aa, unidentified
  source 1..534: note = uncultivated organism
MENNNQDKKPLRCAIYTRVSTTDNLEKDFTSLDSQRESAENYINSQKAEGWVALPDIYNDAGYTGANTDRPALQKLITDIKTGKIEAVIVYKVDRLSRSLLDFTQLLEFFEEYKVVFVSITQLFNTKTSMGRLTLNILSSFSQFEREIISERTRDKMGAAKKRGKWIGGVVPLGYDLDRENHKLVINPLEAKVVKDIFHAYLKEKSVLKVAQQLNEKGILTKRHAAIQGKPRGGLPFTGNAIARVLRNPYYLGKVRYQGQFYPGEHSAIVDEDTYNKAQAILDANMPEQLPKQRHQKIALLNGIMRCKSCDSSMYLTYSIKNGRLKYNYYLCSKAQKRGYKSCPVKSLNTGLLERKVIELLRTIIKDERFKKEHWEKLTTEQRIPILHSFVKQISYEARSSILEFILCNGKRRSFEVPVNMLKSTGQFNQEKALRNEPQIRQNLLLAHQAQQLLNEGKAKSLRELSGWLNLSQQRLNQVVSLVLLCPKIQDEIIFGNPKRVALAPEYKLRPITDEISWEKQLVLWQTLLKTLLK

SEQ ID NO: 6850 - protein, 517 aa, unidentified
  source 1..517: note = uncultivated organism
MPQVQVIAPLHVSEPAKLRVCAYARVSSDSADQLNSFASQVRYYTNLISGNENWTLVDIYADRGITGTSTAKRTEFQRMMEDCRKGKIDRILVKSLSRFARNTQDCIAALRELRQLGVTVVFEKEHINTGTMANEMLISMMSAFAQEESVSISKNLRKAVQMRMQSGTYKTASIPFGYDRGNDGTYIINEYEAKIVRFIFSEFLSGTSMNEIAKSLQNRGVLRSDGVYRWYGFTVGYILRNEKYIGDEILGKSYKTESVPFRRVRNHGEKPTYYLQNVHPAIISSKEYEAVQSLLKQKSQKYYCADEKHSSKHMVPNILYCNVCGALFYRRCNRRGVEWVCGNHFRDASNCPSGLISEGELMTLFQRLIFKLRWNECKILKRHLAMLAAIEVFDQNRKSVQRNHEEIAALSDQSHTLHRLLTAGCIDSSFFYEKEKKLQSAIHNIRQNILRDRSSQEKLLKIEATKSILQCVTTAPAHQFEPECFAKMVKKITVDNEKVVFTLYNGLELSESREGIK

SEQ ID NO: 6851 - protein, 517 aa, unidentified
  source 1..517: note = uncultivated organism
MKVAIYCRLSEEDRNKQFETDDSNSIQNQKSMLLQYAMEQGWELYNIYSDDDYTGADRRRPEFNRLLADAEAKRFDIILCKTQSRFTRELELVEKYIHGLFPIWGIRFVSIVDNADTANKGNKKSRQINGLVNEWYLEDMSDNIRSVLTNRRLNGFHIGAFALYGYKKDPDHKGHLIIDEEAAAVVREVFNLFACGYGKTAIARMLNDRGIPNPTEYKRLHGLRYKQPKGKNSTLWKYFAISDMLINEIYIGNMVQGKYGSISYKTKQNKPRPKSEWYIVEGTHEPIIDRALWDKVQAMIAKRAKPFSVGTIGLFAKKVRCANCGYIMRSSKNNGKHYLQCSNRHVAKDACIGSFISVDRLERMVIAELNRLSEKYLDKDELTQNIEFAANLQEQRKRMISDLATYEKRIEEYSKGIRDIYMDKVRGIIGESDFLDLTKGFTADKERLERTIQDGQKQLADIDARIAAGDNRRELIEQYTNLDHLTREMVDILIDYISVGKRIPGTRDVPIEIHWNF

SEQ ID NO: 6852 - protein, 573 aa, unidentified
  source 1..573: note = uncultivated organism
MTSTTKSRIRCAVYTRKSSEEGLEQSFNSLQAQREACEAYCSSQRHEGWHVLSAQYDDGGFSGGSMERPALRRLLEDIAAGKVDTVVVYKVDRLTRSLADFAKIIEIFDASHVSFVSVTQQFNTTTSMGRLTLNVLLSFAQFEREVTGERIRDKIAASKRKGMWMGGNVPLGYDLRERKLIINEEEATVVREIYRQYLLLGYVSQLKEYLDRSPIRSKVRLNGAGIRTGGQKYSRGALYQLLKNHLYVGEIAHRGQIYPGEHEPIIERELWQKVQKNLAENRQGERKRTRTTKDSLLTGLLFDEQGNRYTPTHAVKDGKRYRYYTSQAVIRRKKDGADLARIPAHDLERAVADRVLTLLSTPHELVSATRDRALPEGQLHSILEAASQRAKTWEKIGIKEKEELLQTVLSKIVVQRDSLQISLDLNALVNLIQGKGLNEASKTQAGADGNRQSQALTLACLFRHVRRGKELRLVIGENQQTTSSSTIALVKGIVRARHWYEQVISGKAGSINELARQAGVTSHYVRRLFSCALLAPDLVEIILSQRHSPGLTLDKLVTGLKLNWEHQQCIING

SEQ ID NO: 6853 - protein, 574 aa, unidentified
  source 1..574: note = uncultivated organism
MAEPAERAAIYARVSTDEQVDGTSLGTQLSRSRAYAAAHGWEIAGEYVDEGVSGARATRPALDRMMAEARRGRFGVVVVAKLDRFGRSVRHLSALLGELDDLGVQFVSVAENIDGSTSVGRLQRTLLSSFAEFERDRIRERMMDGIMAVAREGYWPGGPPPFGYRTVRDGRHSRLEVNPAEEAVILHAVECVVDKRMSAHETADELNALSLLPRRSPRWTQQSLRYQLGSADGLSGRWTYKRPTRTGKPARDSEPRYPDPVVIQIPAILTPERHEALKQALEATSTGPGATQRKNTYLLSRRITSPCGYPMYGHTNGFRKATYKCAQSWAWVPLNERCRCPTVPGAVIERDVWSEIAGILTNPELLMRGAREALQLVASTKEIETEDLAAIDRRIARLERGAGEQVAKLLAAGMDPAVAQHAVAALTSDLESLRAQRAKVAAWSVANAERTSRAERLWELARRAARILAEPTPEVQRRVIEALDVRVKVSGYRECASCQGSGWQAAEPNEAGKRPKGWKGIVPCAACQRSKRTMEWSMTGEVPDTLLDVPGDPAVHDPGVPGLPFRVLPGSASA

SEQ ID NO: 6854 - protein, 512 aa, unidentified
  source 1..512: note = uncultivated organism
MPQVKLISPQTKQQTAKLRVAAYCRVSSNSADQLNSYARQMKVYTELINRRKEWQLVEVFADEAVSGTTAEKRPEFLRMIKACELRQIDLIITKSVSRFARNVKETLEYVRKLKLLGIGVQFEKEGINTMSLGDEMLINTFSAIAQEESVAISQNLRLANHKRMADGEYINASEPYGYQFDGKKLIPCESEALIVKNIYEYYLNGLSTAEIAFELNSRGIPTKTGKDKWRAARVACIISNEKNVGDSLYQKTFTTPLPFKKLKNRGEEDQYYASDTHEGIIDREIYERAMALLEKRRAENARKTEITQYPLTGKIRCEDCGSYYRRRIVRDRIRWGCAAHIEDSNMCNSHYIAEERILDGFTAIINKLCFGDNRILGDTENMLSAAITAMKRQNTDAAQISKEIAELNSKLLVLEQLRSKGYMAQEIFLSQSQEVNNRLKKLKAQRQSSYESKLEDELQKIRTLRKLLSEITEPIVGFNNTLFEETVDSLSLNNRDELTVTFIGGVSFKEII

SEQ ID NO: 6855 - protein, 550 aa, unidentified
  source 1..550: note = uncultivated organism
MAPAKPPARRCAIDTRKSSEEGLDQDFNSLHAQRDACEAYIKSQAGEGWQAAPVAYDDGGYSGGTMQRPALDRLLDDVKAGRIDTVVVYKVDRLTRSLVDFANIVEIFDTRDVAFVSVTQQFNTTTSMGRLTLNMLLSFAQFEREVTGERIRDKIAASKRKGMWMGGFVPLGYDPDGRTLSINPTEAETVRTVFGLYLQLGNVRLVKAEADRLGLRAKARTRANGRAHGGCRLSRGYIYKLLGNPIYVGRIRHGDQTYDGLHDGFIDAETWDVVQAKLGDNAPEQQEERQLSQPSLLMGKLFDASGRKLTPSHANKEGRRYRYYVSRHLVVGSDEGDGPQHGDGWRLPAAEIEGIIGTAIRDLIGGQAALTDAAREAGVAARCISGLLNAVKSWNGDPLELVDHVTLGESVIAIALELSSMTGAVDIRLHLKLPVRIKRRGVEMRLVLRGRSSADHARHDPILIKAVARVVGWFDDLASGRVASIGEIAASHQLGRRYAAQHLRLAFLAPDIVSSILAGNQPADLTAEALVRHVDLPVDWDQQRALLSVQ

SEQ ID NO: 6856 - protein, 520 aa, unidentified
  source 1..520: note = uncultivated organism
MAAAEFEMPVGLRRKTMRCAIYTRKSTEEGLEQAFNTLDAQRDAAEAFIRSQRQEGWTVSPDKYDDGGYTGANMDRPALQRLLQDARDGVVDCVMVYKVDRLTRSLLDFARIMDVLDKHGVSFVSVTQQFNTTSSLGRLTLNILLSFAQFEREMIAERTKDKMSAARRKGRWVGGIPMLGYDLSDKGAALVVNEDESARVRAIFDLYLEHGSLIPVVQELGRRGWRMKEWTTRKSTIAGGQAFAKNRLYNLFTNMVYVGKVEFGGQVYEGEHEAIVDSEIWQRVQDRLRFNGRTGGRQIRNKYGAVLKGILRCASCDAGMIHTYTQKTPNKLYRYYVCVNAHQKGYNQCQTRSVSAPVIEQAVVDQIRGIAANPELVGEVVRQMDEHRIAGVEGLEREKRVMEKELQRLGEETASLVRTPGKLATDRMAELQDRAAVTERQLRDVRDQLAESVGQTVDAASVRKTLREFDGVWLEMTPREQEKFVKTLVERVSYDGATGTVTVGFRTAGIRQICAEGQNG

SEQ ID NO: 6857 - protein, 506 aa, unidentified
  source 1..506: note = uncultivated organism
MKPVRPTRCAIYTRVSTEHGLDQDFNSLDNQREAAEAYVKSQAHEGWRLRPDRYDDGGFSGGSMERPGLQRLLADIAARRIDIVVVYKVDRLTRSLADFAKLVELFDAEGVSFVSVTQAFNTTNSMGRLTLNMLLSFAQFEREVTGERIRDKIAASKRRGIWVGGIVPLGYRVESRKLVPDEAEAATVRHIFERYLSLGSLPALQAELRRHEIVTRRRTLSSGRIVGGGAFLTGALSHLLRNRVYLGEINHHGASYPGEHPGIVPPELFGAVAARLEANLKVRHAHRAASGALLVGRLFDDRGNRMSPSAANKGQVRYRYYVSCALAQGRKQEAGSVPRIPALEIETAVLDALRARGDDGSDDRALVQGLDRVTVFPDRLELMLPDGDPLSVPYSGARRPYCETLAATEMPHRPMKAETRSGLLRRIALGRRWLDQILAGTTSPELLARRERCSQRQIERTLLLAFLSPPIVQAAADGTLPRGLNGTSLADAPASWAGQQRWIEAG

SEQ ID NO: 6858 - protein, 532 aa, unidentified
  source 1..532: note = uncultivated organism
MAEKHLTDGTTALAAQPRVIKIEAAEKPENARLRVAAYTRVSSDSDDQLNSFAAQNRYYAELISGKAEWRMVDIYADEGITGTSAAKREDFQRMMADCRRGLIDQILVKSISRFARNTKDCLEAVRELKELGVNVRFEREGIDTANVSSELITAIYAAFAQKESESISGNMRWSYQRRMEAGTFIPSSMAYGYKLVGRKIEIDADAALVVCRIFQWYLNGVNRTAIAKKLNEEGISSGQCKKWHDASVRYILTNEKYTGDSLWQKTYTSDTLPTTRHKNKGEHEQYYAVGTPPPIIPREIFDQAQNLLQKRETDYRKRNCSGSHPLTGKIVCGCCGSTFRRKEYRGKTRWACMGHERSGKDCPITPITGKTIYEAFCRLYYKLKHQSRPVLEQMLETLQTIRDRRLLWSEDIVSLNKKISELSSQNQTLAFLKQNGLVDPDIFISKSNELTRQLRQAKLDKEKLMAAEGDTTAQRTRELIALLEDGPDFLDRPDTELCSALVAEIIVESNDTLRFRLHNGLELRESIERTVR

SEQ ID NO: 6859 - protein, 529 aa, unidentified
  source 1..529: note = uncultivated organism
MAKITIIPQKINPITHLPNDSIKKTRVAAYARVSTKQEDQANSYEAQIKYYTELINSRPDWVFVGMYADKGITGTSRKHRVQFNRMIDDAMNGKIDKIILKSVTRFARNTLDTVGLSRQLKERGVEVFFEENNISNFDPNGELNLTINASIAQEESRNISQNVKWGKHKRYREGITSVAYSHFLGYEKHPTDPKIGFVINDEQAKTVRLIYKEYMKGKSTSSIARLLESLQIKSPSGKDKWSVSTIESILSNEKYKGDARIMKTYVKDFLSHKSVQNNGEVESWYVENHHEPIINPDEWEIVQAEKRRRMEIGSSYSSSNLFSSKLVCSDCGAFFGHKIWHSNDKYKKTIYRCNSKFNKDHEKCKTPSLAEDEIKEKFLKAYSEFIGNRENIIEDARLIKETLVSFDDINDQIEKLKERDDEVIVLAESLVSRNATETMNQEEFKKKYKFYDDEHQEIIRKIEELETEISNRKAKAKYMDSFINDLATRPLVLEDWDDDVWCYLVDKAVVNRDGSIVFEFRNGKKIKVD

SEQ ID NO: 6860 - protein, 524 aa, unidentified
  source 1..524: note = uncultivated organism
MKPAQAPKRQRCAIYTRKSTEHNLDLAFNSLDAQREACEAYIKSQAHEGWTLIRDHFDDGGLSGASLDRPALQNLLNEVRAQQIDIIVVYKVDRLTRSLADFAKLVEQFDEHDVSFVSVTQSFNTTSSMGRLTLNVLLSFAQFEREVIGERVRDKIAASKRKGIWVGGPVPLGYRSVAKKLEIVPEEADLVRKIFSDYLRLGSLGALAASLNGEGLKPKPRQLTNNRTIQAACYRVGPLAYLLKNRFYIGDVVYRGEIHPGEHPSILDHDLFEAVQARLKDQTIERSALRAASPSLFAGRIFDDRDNPMTPAHANKQGVRYRYYVSHALLQGQKSSAGSVPRVSAPDIEKLVLSALRSNTGVNPDASDREVVELHLERAIVCRDSIVVEFKVPDQGDAETEAMPLKVSIPFSPTVLPRKGVIHAPANVGAIDEATRMSLLTSIARCLAWTLSIIEDPTINFATIAERENLAERHIRFLAPLAYLSPRIIEAIAEGRAPAGMTVTRLARKLPLAWAEQEMAFGLT

SEQ ID NO: 6861 - protein, 522 aa, unidentified
  source 1..522: note = uncultivated organism
MSRAKKKVPAKSKVRCAIYTRKSSEEGLDQEFNSLDAQREAAESFIASQKAEGWTALPDRYDDGGYSGGSMERPALERLLSHINAGKVDCVVVYKVDRLSRSLMDFARIMETFDRGGVSFVSVTQQFNTTHSMGRLTLNILLSFAQFEREIIGERIRDKLAAQARKGKWTGGAPVLGYDVDRSGPSPRLVINAKEAAQVRDIFRMYLREAALLPVVKELARRGWANKRRTTKKGKQLGGRPFDKATLYVLLTNPIYTGQMPYKGDLYPGEHEPIIDRELFDKVQHQLKENGRTGGAEVRNKYGALLRGLLRCKGCGTSMTHTFHRGKGRVYRYYRCTHEIKNGRDACTADTLPAQEIEALVVDEVRRLAHDEALLAQVLTDAHAAIQGELVAAQRDLDDLRQQLGRDSRELQRLAASGRSDDETTSRIADLHTRLADANRQEPQLKARVHELGNEIVTHADAQTALAEFEDLWKNLIPREQARLLKLLIATVDYDGQAGTMSVTFRPTSIRSLIDRRLEQAA

SEQ ID NO: 6862 - protein, 545 aa, unidentified
  source 1..545: note = uncultivated organism
MKERRCALYIRVSTLRQADIEDGSLDAQESKLRAYVDYENNLKNGLWKIAGIYREEGRSGKDLKRPEFQRMMRDIKNGRINTVIIYKIDRLTRSLKDFSSLWDKFQNNGVEVISLNEKFDTATAIGRAMLSIVLVFAQLEREQTGERTAATMQYRAEQGLWNGGRIIGYDLDPDEKGILKVNDEQAKIVRKAFNLCIKTGSAGQAQKALNDLGYRVPVYESRRGKKHGGNLFNKQMVIKMLQNPVYLGKITWNSAQYKGKHRAIIDKKTFLKVQEILERNRKTRSNDRLPSEHIYLLQGILTCRKCGSVMTPKSGISRSNRYYYYQCTKNAHTGKEGCDARYLPAEPIEDFVLDRVKELTTDEAEIDKMITKANKNGDQRINELMRDKKNISSRLKDIDNRLNQIIDSIENGKLKAFGSLNKRIESLEAERTSTESRLKTIDFEMAEIEKQRLSSEVMSQSFRTFRDIIDRASPRKLKDLLNRIVEVVEWHENEDDRASGHCRISYFEQPNLKLPIKKLSEPGKSEFAECNVWLPSTDSNRGPSG

SEQ ID NO: 6863 - protein, 582 aa, unidentified
  source 1..582: note = uncultivated organism
MERTIRPIRCAVYTRKSTEEGLDSDFNSLDAQREAGEAYVASQRQEGWVLLPDHYDDGGFSGGNIERPALQRLLKEMEAGRVDCIVVYKVDRLSRSLMDFSKLVEIFDRHKVSFVSVTQHFNTTDSMGRLTLNILLSFAQFEREIIGERVRDKIAAAKKKGMRCGGVPVLGYDLVDGKLVVNPQEAKLVKMVFEWFLRIGSTTILARQLNDQGHMTKAWTTVKGRVRTGSPWHKAHLYRLLNNRTYLGEVTHKEKVYPGEQKAIIERSLWDKAHSILAKNYHARSASTRAETPALLKGLIRCGHCGKSMGITFTRNKGRMYRYYLCQTASKSGYGACPVKTMAAGEIEKVVVDQLRRVFSDPEIAARVGKMVGENMPLDAKEIRDALRNIDEVWSELFPAEQARIVQLLVASVEVEEHGIVLNIRRNGLRSLVMESNGPDGQEGSQAEEDDGTLSVAIPMSFKRRSGRKEIMVPTGSAQASEVVAPPQEPLALALARAFEWQELLDTGKVKSAGAIAKQAGVSKAYVTRILRLSHLAPDIVQAILDGREPSGLSLVKLSDPMPMAWEEQRVKLGFPSIVTSI

SEQ ID NO: 6864 - protein, 1223 aa, unidentified
  source 1..1223: note = uncultivated organism
MDKQDKAMWVNKLWDPLEEMNKSPLHSKEKGIRVAAYCRVSLDSLEISQSLESQLSYYTHFINNRDNWTFIGIYFDNLVSGKTAEHRRGFTRMLRHCEEGKIDLILVKNISRFSRNTKELIEVVERLKELNITIYFETENIETTRDNTTFLLKTYSSFAQGEIEAHSQAVEWGHEKRMLKGKVYLGHLYGYRQIKMDDETRVEIDEEQARVVREIYQMYLNDMSLNSIAAELTKRNIKTYFGKDIWQPCTVLSILSNISYTGNVLTRKNTTDLMSNKRRSSEGIRDQYFIENHHSPIISQETFSNVQEKIIKNKEERNENGPYKPRSQNPLTKRVVCGNCNTSFNRRTTPPWYYYKCLKASRNKKFCASPTIREDAMVEIMLGAFKNRFDTEDEKITKTLQRMLIKINRNDHFEFHRLKALTQIHLAKQLRGDKYTDEYIDQMEKAYAQFEEQLIKIEDDRKFRLEAIQWLENIKNFDMFEEQSTIEYMRAWILEMTIYSKADYLVRWIDGIETEIGNCVPVIHQIEDPLEEKETLIDGVVITNKGPIKVIEKHTNIISVEGGDICDAVNEEEEILIVEKNNQLDSNIIVKSLERQLSNSVIMQTTMPVVRKDKIRTAAYVRVSTEHTQQLESLKIQYSYYLFLILKEPNYSLAGIYMDDSSGTTTKGRDEFNRMIEDCKAGKIDLIITKSITRFARNTVDTLKYLEILGNLEPKIQVWFERENLFSLDSRSGLLIKLFSALSQEESLSISNSITWGKNKLAQRGVVHPARVGYGYKYGRNKEWLVNEEEAKIVTRIYEEYLKGKNIRQIANLLMDDLIPSPEGNDYWQSTSITRILSSEIYRGNYIYQRYHTGSDLIKRRIENKGELPMYYIDNHHTAIIENDMWEKVQEMMSKKSKIREEEIKKYPEDTKKNEAFTKKLFCGKCGNLVGYARSIYRLKNNFEARRWRCYRADKGTCDAISLRQDYIEENFSQLLMDIKFNPDFQKYLSSFKESLKISQEEEIQREELKLLKESLNNELYKVVEGELGKKGKDTKLVDELIDKIMELRAQLKVFIDREEQLELIEEEITELMPKLDKYKSSKKDDLGYYIKAPAFNKELFEQFIETGIVNEDGSILYRFNSGFEWAASIKYSDHQEQDKKRKAAKRVEEKERYLKGPEVKRLIEYCKEPKTVTEMREFLPRYLTNFNFKKFIVSPLVDKGIMKETRPGKITSKLQKYFSVEE

SEQ ID NO: 6865 - protein, 540 aa, unidentified
  source 1..540: note = uncultivated organism
MTPIASRKVRCAIYTRVSSDAGLEQDFNSLDAQHDAAQAYIRSQAHAGWTLLRCNYSDGGFSGGDTERPALQRLLEDVRAGKIDVIVVYKVDRLTRSLTDFVRLVELFDRHGVSFVSVTQQFNTTTSMGRLTLNILLSFAQFEREVTAERIRDKIAASKRKGLWVGGMVPLGYVTRDRKISVNDAEAARVRSIFDGYLKLGCLNLLLADLRKRGIVTKLRTLKSGQVTGGIPFTRGALAHLLRNRFYIGEVVFKDEVLAGEQPPIVDRDLFEAVQARLTEQANHHRAARIRSAALLTGRLFDDRGNRMTPTHARKRGAKYRYYLSSALLQGQPEQAGVVRRLPAAELEAAVIGAVRNHVKPAAQIEDRSLIEAHIARVEVKPEYLVIQLTQPQQDVADDARGRQTTLQVPWCKGPPTRRREILLPAAARHDVRPMRAETRATLLTAIAHGRRWLHELVSDRAATARSIAQREGCSVRRVTMLISLAFLAPDLVKAAIEGRLPRGMGVARLVDMPSEWSRQYDIIGLYPAANPTSVPYGAP

SEQ ID NO: 6866 - protein, 529 aa, unidentified
  source 1..529: note = uncultivated organism
MDTKRVGIYCRVSTDEQAESGYSLEDQNTRCRAQTVAKGWEGVGEPYIDDGVSGTLGIAHRPALKRLVQDVHAGKIDAVITLKMDRLARNLKLLLTIWDDLEACGCDVVTVKESIDTTIPTGRLIRNVLGAIAEFERDTILERTLAGKHVKVTQRGEVMRSTAPYGYRLIRRDRSSNTPGYLEVDTTTASVVRRIFELMTAGHSTTKIAETFTREAIPTPKGQQTWAYASIKKIINNPVYYGQAAHGVTIVTGKAEDGKQIRKRQATADQHFTAVPATVDRPLWDAANSQLGHNRRFARRNAKHSYLLGGGLVKCGLCNHTMSGVTNGQLVYYRCSHTTPDASRVVHSVPAPVLERVVWGTLCDLLRDPGRVLADVEALADDSSAQAKDTDKEIARLTKAEQDVEHQESRLLDLYIAEKLDADRYESKSAALKAQRHVLRRKALELADRRASVVADVLPIEDVRAMCAAVARGLGKLTDEERQQVVQTYITKITATRERVAIEGRLPSLSASVALAGEGTPPCIAGTPC

SEQ ID NO: 6867 - protein, 550 aa, unidentified
  source 1..550: note = uncultivated organism
MKRVLCLYRVSTKGQVDKQDDIPMQRRECLAFIEKMEDWVFYEEYMEKGVSGYKVSASKRDAIQEIRALAEKKKFDVLLVFMFDRLGRREDETPFLVQWFIEHGVEVWSTREGQQRLDNRVDKLLNFMRYWQAGGESEKTSMRVKAAHTQMTADGLWRGGVRPFGYRLVHQGRVGKKNRPLYDLMIDEVEGPIVRELFDLVCREGYGTLRVANYLNDKYSTLGKLWTAQTVRSMLRNPIYTGRMHMNDTLSEPIESLRIVSDDEMRFAQYTLTSHIQRRYPEQRAKEDEAMPEDVPNKVSLYGATLLSGLLYCGHCGHRLVGGYCTKQRGQVAYHRPVYRCYNGSVKAKGCDGQRVYSAKKIEEAVLEIVQQYFHSITKTVDSVWKEQARRQLQSKQTAQLHAAENQVTKLQAQQTRLRQEVMKSLMDDSMFDTELLKSMLDDNKVALAEAEKHLEICREEKASEETVLQRLSEQYRHISDWAEEFAAANADSRKMILARIIEKITVDREYHINITFFVTEASFCQQISQADRNVKILEAGQERGFAVNH

SEQ ID NO: 6868 - protein, 524 aa, unidentified
  source 1..524: note = uncultivated organism
MTRRRRTADGYIRVSRRAGREGESFISPEVQRKKIADWAKLHEVEIVRWWEEIDQSGAKLERPQFQEALARCERGETGGIVVARLDRFARSAIDALESIRRLNEAGARLVSVEDNFDGSTPMGRFAIGILTLIAELELERIKENWASAVSSAVARGVHISARVPTGYRRDEEGRLHPEEPAASAVREVFRRRAAGASWAELARYLEEARVYPSTGNEHWSLFGVSSLVKNPVYLGQARSGKVVNEKAHKPLVTRAEFDAAQRVSKSLLKKRDGSVASQAMLGGLARCAGCGHTLKITGNTKRSTGERYPVYYCTGRYASGPCRARATVRASLLDEYVEQQVLAALSAEGGLLAQAVEASEAVDEAARTVADAEHELDLFVNNPTLLTVLGEEKFVEGVEVRQRALDEARAGLAQLRSHSDLATELGDGDLLTAWPSLTIQERRRLMHGLLERVVLTRAEERGRAAEPISERTEIVLRGGAILAVPQNEALPDAGSSGKRTATTARGRTQKTRKAGRTRTRSASS

SEQ ID NO: 6869 - protein, 574 aa, unidentified
  source 1..574: note = uncultivated organism
MQGEPKTRIRCAIYTRKSSEEGLEQSFNSLDAQKEASRAFICSQKHEGWRVLNTIYDDGGYSGGTMDRPALKRLIEDVQAGKIDAVVVYKVDRLTRSLADFSKIIEIFDAHKVSFVSVTQQFNTTSSMGRLTLNVLLSFAQFEREVTGERIRDKIAASKRKGMWMGGTVPLGYDVKNRKLLVNTTEAKSVREIYRQYLRLSCVSKLKVYLERTGTRSKERISQTGHKSGGSVYSRGALYKILQNRHYLGEIEHHGQVYPGEHEGIVPRKLWERVQAQLRDNDNAHQNGSRATEPSLLVGLVYDEQGNRFTPAHAVKDGKRYRYYVSQAAIKNPGSRHKGSVRIPAREIEGLIFSKLRSVLESPDAVANAIGLQTRNAAATQRLYANAKELSMRLTSGDTAEMRPFIRDLVSRLDVRTGSIDILLKKLTLRSALLGASQSSVSSRSNSYNGLLTIKVNAQLQRCGTETRLVLPSISNGEGPVHSAQALIKAVVRAHSWHRRIVQGELSGRRSIAKATGMDERYVTRIFQCAFLAPDIVESILDGRQPPNMTLQTFRVPLPIEWAAQRLLLGFPAR

SEQ ID NO: 6870 - protein, 522 aa, unidentified
  source 1..522: note = uncultivated organism
MMRKVMKIEAGGDRLISSLKLRTAAYCRVSTDNDGQLLSLEAQKQHYEKIIRDNPEWEFAGLYCDEGISGTKKENREGFLRLLQDCEKHKIDFVITKSISRFARNTADCLEIVRRLSELGVFIYFEKENINTRAMDSELLLSVLSSLAENESVSISQNNKWGVRKRFQNGTYRQAIAPYGYDKIGTTLVPNPEEAPVIKRIFDQALSGVGVYKIAKGLNADGIAGRNGKPWSAGTVRGILANERYIGDLLLQKTYTDDSFKRRKNGGELDMYYMKDHHEPLVSREDFEAAKRMLDQHAREKGIVRDGRKYNMRYPFSGRIVCGQCGGTFKRRIHHAGRQSEYVSWCCGTHIEDISACSMLFVREEHIRKAFVNMTNRLHSGLDMVLKPLIEALRRQDGDGYFARLDEIERLISENSERAQVLAGLMAKGYLEPALFNSQANALKQEAERLKKEKAALSAAISEFSAVSAAEEVYRCLLRRGYMEEFDGDFFERFVDGMTVFSPVEIGFRLKCGLVLRERMER

SEQ ID NO: 6871 - protein, 500 aa, unidentified
  source 1..500: note = uncultivated organism
MAAEVGPSFRFGAIKRRSQYNADGTEDSTARQEDAIYAYVEQRGLGRIVAVYSDIASAFDEKAKRPEFENALEDLRARRINGIIVWKLDRLTRRRSQMRRILTLLEDCGGRLVSVVEGIDTADPAKREITELVLNVYMGIAQGESEAISERVRMMQYDRAKKGLIQKGGERPFGLTADWSELVPAEVKILHEAGERVLEGESAFSIARDFTAREIETTRGTTLWWPEVLLKMLRNPRMIAMHAHGGKLYPYANVPAIFEREEWERICAKLERKPAAPTEVRLLSNIVLCDLCLNPLRASGRQFKGRRSRDPEEFSYRCRRKTKVIDDGACGKLFITGPLADTEVSRRTIAWLSNRENITNLLYRYADRNNLAEIQAREAELTTALQDLAEARFNPPPGVQRMTDEMYYGLVAEVQAERQENHRRLAVTREAGMLSELLEVKDLETEWHGRSVHWRRAMLKLVTLSIVIEPRGKGPSGQRAHLRTFDPSRIKMQFVGDAIE

SEQ ID NO: 6872 - protein, 561 aa, unidentified
  source 1..561: note = uncultivated organism
MTHDTTQRRTSPQAPPLKPQARAKRAAIYTRKSTTMGLDQDFNSLDAQREACAQYIRSRARHGWHLLPDAYEDGGFSGANINRPAFQRLLDDIEAGKVDVVVVYKVDRLSRSLIDFAKVMERFNKAGAAFVSVTQNFSTADAMGRLTLNMLMSFAEYEREMIAERTRDKIVAARRKGKWTGGSVPLGYQVVDKKLVVDEVEAVVVREVFDLYLEHGSALTAARILNERGRATKRHRAQNGNIRKARPWTKDAVLRVVKNAIYAGFMPYGDEVHPGEHDAIVPEERWRQAQAMLRKQTRRTRARPRTPDYMLRGLLRCACCGAAFTPASTRKGGRTYRYYRCLTREKQGRGACPARPLPAAAIEDFVIDRLHEATEGGALAAEVRARIAERLEREHAELHTERAGLPRTIAELSAEGQQLVSKAAALSGPAARLLDERLEEVGHELARLQDRLAVVERRLAGLDELEAEAAWVAAALDDFTALWKAMTPPNRYRLVHALVHEVRVDEPSGEVTATLVDFGATPPDPDAGPDEAPPSAPPTATTPATTAPPSLHLVAPTETSP

SEQ ID NO: 6873 - protein, 528 aa, unidentified
  source 1..528: note = uncultivated organism
MRNGNGRRPPAETTNKVVRCAIYTRKSTDEGLQQEFNSLDAQREAAEAFIQSQRHEGWQLLQDRYDDGGFSGGDMDRPGLKRLLAGIEAHKIDCVVVYKVDRLSRSLLDFARIMELFDRNNVSFVSVTQQFNTTTRLGRLTLNILLSFAQFEREIISERTRDKMCAARRKGKWVGGHPVLGYDIDPRGGKLVVNPDEARQVRKIFDFYLEHEALLPVLQELERRRWRMKRWTTKDGLTRGGKPFTKGALHSLLTNVIYVGKVDHKGTIYAGEHEAIITPTVWDQVQKTLQRNGRPSGASTRNRYGALLRGLLYCVPCGAAMIHSYTARKSKRYRYYVCYEAQQRGWRNCETRSISAPAIEAAVLESIRRLGADPALAAETARQARAHLARRIGEAELEQAAAQKQLRPLNAELVKLAGDGTIQSSERLDRLVSLQKEIQATEQRLSELADELQELRDNAFDQQDLVQALEQFDPVWNSLTTREQARLVHLLIEKVGYDGRTGKVTVSFRSAGLKELCNGKGETTTQAR

SEQ ID NO: 6874 - protein, 540 aa, unidentified
  source 1..540: note = uncultivated organism
MKDNVLHIYTRVSTNAQEEKGTSLDSQKEMGIKRAKELGFDYKIWNEGGASSNYETLENRPQLLSLLNETNKGNVKHLWVYNNDRLSRNEVTAQQIKIVLQKNDVRLYTLTGILDFNNPHDNFIKTVLDGISQLDNAMRADRTRMGKLNRVKQGFWQGGPPPFGYQISEKKLVPHLEESKWVCKIFEWYADRVPIEKIKNSLIQSGVKTRRGNYIWSLGSINKLLQNTHHKGSYSYTDKVTKETITCFCPPIVTENLWNKCQENRRKILERKGQKIKTKNFYMLRDLLYCGHCGSPLSGRIKKKKYEKHYYCAQKERDWKNNPPAENQKWVRGKGCAMVRSLNIDATDKLVWDSVINVIDKAFSRKYDSVNTFSMLVEDYINKMKNSYIKSDFSKDLKKYKKERDNIEKNIISVETAKIMGNQDKRIAAGVIKNLNQEINLINEKIQELEFKERNKLKFEDINKVFENLHKNKTSLNSYSKEEKKSYLIAIIDSIEVFWDQRRKLHRLEIYFILKNFNDRISDNFSIKSEYIEIRVKKRL

SEQ ID NO: 6875 - protein, 532 aa, unidentified
  source 1..532: note = uncultivated organism
MKTAAIYSRKSKFTGTGESIINQIELCKREGDHLGIDQFIIYEDEGFSGKNIKRPQFQKMLIDSREKKFDVLICYRLDRISRNISDFTLLINELDSLHISFISVNEQFDTSTPMGRAMMYIASVFSQLERETIGERVRDNMLELAKTGRWLGGQTPLGYESKELSYLDSQFKQKTMYTLSPIKVELDVVKIIYDKYLHYKSISQVFIFIFKKNIKTKNGADFNKKRIQLILRNPLYVRANDAVMDHLKIIGMNVTGTADDKHGILTYNKSKGARIKRDITQWIAAVSTHDGVIAAPLWLKVQKILDGNKNKAPRLGTSAAALLTGTLKCSKCGKSIFVKHGHISAETNKKIQYYVCSTKDYSKGDRCNNPNIRVDELEKIVINNLNIITIQKSILLEELNKIKCELSKNSFMLSEIDSLHGQINIKKGQIDILINQLSLDNEMSKYITPQISKLGNELDKLTIKYENIKTTSYKVKNDNSTVNKFLFSLNNFSSIIDILNFDNKRLLLNNVVESIYWNGAKGIVTINLVCLK

SEQ ID NO: 6876 - protein, 537 aa, unidentified
  source 1..537: note = uncultivated organism
MTRSPGQRLRCAIYTRVSTDHGLEQDFNSLDAQREAAEAYIKSQAHEGWTLIRTAFDDGGFSGGSMERPALQRLLAEIGAGRIDIVVVYKVDRLTRSLADFAKLVERFDAHQVSFVSVTQSFNTTSSMGRLTLNVLLSFAQFEREVTSERIRDKIGASKRRGLWVGGMVPLGYTTHDKKLAVVPEEAERVRLIFRRYLELGSLDLLLRDLRQRGIVTKLRSLSNGRTMGGIPFARGSLAYLLRNRFYVAEVVYRGTVCPAEHEPILDRAVFDAVQDALTERQHGIAAARHGSQALLMGKLVDDRGHRMTPATARKAGRSYGYYVSAALHQGRRDEAGSVPRVAARAIESVMVRALRERCPRAERLSDGDLVSRHLAGARLTGTTIEMDVVLRPHGPTKGHPGDDAGRDDDDRGPIRVSIPWTRGSTRRAREIILPKASGRRALQPINAATRSTLVRSVAQGRHWLAEITQGTVTGPDAIASREGCSTRRVAMMLSLAFMAPDLVQAAIDGRLPRGIGVSRLFDAPAEWTRQRAMLGL

SEQ ID NO: 6877 - protein, 547 aa, unidentified
  source 1..547: note = uncultivated organism
MNDNIPGGGEVRAALYARVSSERQAEKDLSIPAQLKALRQHADRHGWRVVEQFVDEAQSARTADRPEFQKMIALSKQKMPPFKVILVWKLSRFARNREDSILYKAMLRKHGLQVVSINEPIDDSPSGRMLEGMIEVVDEFYSANLASDTIRGMNENASRGFRNGGRSPYGYRRVKVKVGETDKSKLELEPAQAPLVKQVFELCLEGKGVKEIAKQLNAQGYKTRDGNHWTNTVLYYMLTNEVYTGVTIFNGYRYWESKGGKEQKTVRVEGTHPALVSREQFERARALLKERGPRVTHPRTVSSNYLLSGLAYCGSCGAKMLGTTAKGGQFFYYGCQTYLKKGRAACPAGLVNQSHLEEAIMGQLEDQVMTDENLSALVTLVNEEANQNRSTSRERMGQLDAQVKTLNGRLDKLYVALETGHVNMADLGPRIKDLRAQIETAEARKQEILAQDASPLKFSGAAIRRCLEGFHELVADGNPSERKAWLRSWVKRIEVDTRKGGTLYYNLPPFVLKAMGRPTTGDPGRSVLSIDQIGCPSRIRTRSGASS

SEQ ID NO: 6878 - protein, 547 aa, unidentified
  source 1..547: note = uncultivated organism
MNTVTNKIRVAAYARVSSLKQVDNYSIAAQLAEVEKYCTLHDYEMTSPYIDNGISGAEMNNRPALQQMLKDLKMNKFDKIVVWKLSRLGRSMKDILQIVEECEKNNVSFYSVSEHLGIDSDMHKLMLNIMGSLGEYERAILKDNIRLASSNKANEGKSVGGQTPYGYDRIDGNLIINQHESRIVKEIYQMYSQGMNYTAIAKTLNDKHEVTKLGKPHSKDSISYILKNKVYRGLVVYNQYVDWKKKGRKGYNDKPIITEGKHEAIVSQELWNKVQAQHKARKCYKRGNNKTDNLLTGLLKCKSCNANYVISNTVNTLKDGSKRRFRYYICRTRKQKGSDCKEAPNIRADFIEDYVFQNIKNLIRKPDLIQKVVNAVNSKRTPDTTQIKHEIANKQFQIEELRSKYDNLIEATEQDSSIIESIQPALLKYTQQIRELENSITHLERKQLVEHPKIDTNTVIDIFAVLFKNLESTNKTSLKNIYHLVIDHIYVEADKGNKKQFYITFKFNKDIVATLLNNINPDEQLLNCSSSFLSQIYSETFFLEFSL

SEQ ID NO: 6879 - protein, 540 aa, unidentified
  source 1..540: note = uncultivated organism
METISGIYLRVSTEDQHPENQIADLKKLADALHCKVFETYVDRESGQYSDRKEFQRMINDAEAGKFKILFIWALDRFSREGIKATLTHIERLKDVGVAIKSYQESWLDTSNEGIWQLLVAVMSWAAKEELKRFKERSMAGKRTMLNAGRLIGCTPPYGRKYIKRDREKGVDGRFERNEAEIEIINKIYKWYLELESIFLVAKRLYDMGIKARNGKFFHASTVRKILTSESNIGNFYYGKSRACEAKYHIHKVRKYKLSGRKKNPKSEYKLIKIEPIIDEAIFREVQNVIKKRGRKDMRIRQSKYEFLCQGLVRCIYCGRIYGTKIQNKHYQLYACPQRRFSNFNDPFCKARSISSRKLDGEVWNYVKGLIENEKLIKEKIKFSKDRREKDKVSNQKRCDILINEKSLIKNKKNKLFELYSETQISEATKQDIKNKLKDFEDREASLDNQILENKKKMTDFYNMEVLETEIERICNIYRGKLNNPDFELKRYITRRWVEEINILKDGSVVIKMKVPFELPDNIIKGEQNIHCIRRARKDNL

SEQ ID NO: 6880 - protein, 594 aa, unidentified
  source 1..594: note = uncultivated organism
MTNPTVQVRKATKQTVNRRKGIHLNTLRVAAYARVSTDSEEQLESYQSQVKYYTELISNNPEWQFVGVYADEAITGTQTTKREDFNRMINDCMNGDIDLIIVKSISRFARNTVDTLQYVRALKEKSVAVMFEEENINTLTMDGELLLTILSSVAQQEVQNISEHVKLGLSMKMQRGEMVGFNGCLGYDYHKEDKTITVNEKEAEAVRYIFNRYVEGAGGKVIARELKNLGYKNKRGESSFSEHGVIGIIKNEKYKGDLLMGKTFTVDPITKRRLDNMGEADQYYTENHHEAIVSRELWDKANEILNKRKGSHSRSNGKRDKYSRQYSFSCLLKCGFCGGNLTRRTWNSRTDYKKTIWQCVTATKHGKKECPYCKGVPEALIEEAFIRAYNALCTYDGEFIDGFLEHVRAGLQNNDTDRELKNLNKKITRLKERKSSLVDMRLDDKIDEEIYQIKVTEINEQMDGLLLQKQSLKDKLQDQQDINKRLTEFQNVISKHEILQKFDRHVFESIIDRVIVGEKAESGEINPYKLKFIFKTGYEKDEVASSQPFSFANSCSNGNNDCGIISLQGDNDTCRDGMFIVQTPRSEASCECET

SEQ ID NO: 6881 - protein, 527 aa, unidentified
  source 1..527: note = uncultivated organism
MSSKSVRCAIYTRKSSDEGLDQSFNSLDAQREAGDAYVKSQAHEGWSVIPSLYDDGGYSGGTMERPGLQRLLADVDTGLVDVVVVYKIDRLTRSLPDFARIVERFDARDVSFVSVTQSFNTTSSMGRLTLNVLLSFAQFEREVTGERIRDKIAASKAKGMWMGGNLPLGYDLPAPGTRILQVNDEEAATVRHIFCRYLELGSVHALQRDLAKEGITSKRWMTSKGKIMGGLAFNRGALFHLLRNPIYRGKIRHKGVVHEGGHDAIIEADLFDKVQQMLERHTVRRREATDARKARSRLTGRLFDTAGEVMSPSFSRGSNGRLYRYYVSASLQQGGTPRDNNIIRRVAATELERALTDLLTRWLPRCPSPLDQVRTIRVRQDGLQIDLPADLEKEIVPNLQPGETIIHSGKTTLQLIAPLLLTLRGGKRQIIAGAGMPARQDPSLIAALRKAHGLITTKRGRPLIKTAPASQYDRKILRLAFLAPDLQRDILAGRQPPHIHLEALKAIDIPTCWSRQREVLGWQTAAR

SEQ ID NO: 6882 - protein, 546 aa, unidentified
  source 1..546: note = uncultivated organism
MSSPTTRVALYTRVSTDMQAGKDEGSLDTQEARLRAFLLSRPGEHEVRTVFREEGASGKSLDRPALQQLMRAVERDDVDLVVVTRLDRLSRSLLDFYELHRLFEKHNVRFVSLNETFDTSSPVGRAMLKLVLVFAELEREQTADRTRQAMQARAERGLWNGGSPPLGYDSQGNGHLDINAHEAELVRLIFDRYLELRSAPQVAKWLNDQGHRQKRFTSRRKGETGGKPFTPAAVRLMVQNRLYLGEITHKGEVFEGQHDPIVDRDAFDRAQNVMEGNAKNRRGPPLRAQHDWPLTGVAQCACGYALTSSAGTGRGGKTYFYYRCVGLQKNVDHPCEVRQVRAELLEDAVFALVREAAREPALLAEAVEEANRMAREHVTPLRDRVDALARELAEVEEEGQRTLRQVLTSGVANSDLARKLLADIEARRDALRASLSAAVSELAGKEAEQLDLELVTQAIQGFDSAFEHLTSAEKREFLQLLIHKATVHKDRVDVELYDGRYASRYLAQVTRNGLVVGPHEGRNATGRETRDGFAAGKEWLPLLDLN

SEQ ID NO: 6883 - protein, 540 aa, unidentified
  source 1..540: note = uncultivated organism
MAKINCAIYTRKSTERGLEMEFNSLQNQEEACKAYILSQAFNGWGYYKTFEDGGISGGTMERPGLQALLEEIRERNIQVVVVYKVDRLSRSIFDFHKMMQEFAKYECNFVSITQSFDTSNSMGKLTLNMLLSFAQFEREVSAERVRDKIAASKAKGLWMGGNLPLGYDLNDRHLVVNEPEAEIVRQVFQKYLEVQNMLGVAEWLNKQGIHTKKWVTKHSQRTRGGEPFKKNTVQRMLTNPVYLGKITHYRQNKIYNGVHKPIITRELWEQVQQVIRRRFHDPNAFNHYKFHKTVLADKLYDDKGKKFRFTSSKSHRRKILYYYNGVGGHYLPMEQLDRFVLNMLKTADFDELEPLADMSAITDAQLSGWITKATCQTVGKKHYLTVFLDEKQIKTDLGNCPKMSGQVDAKPLKMERIEDTIYLRDSFMVDNISSVRLCNGSARNILTIRQLNESLVRALARGWQLKKISERGGGMRVLEKEVHMTKRTISRYINLCYLSPRIVADILEYKNPANLTLRELMNLAEGQVDFDEQEKAWKYC

SEQ ID NO: 6884 - protein, 586 aa, unidentified
  source 1..586: note = uncultivated organism
MNDISNKKIRVAIYLRVSTDEQAMKGYGLESQEEKLRAYIKSQENQTFDEKHHLYKDEGYSGTLTIESRPALKKLFDDAKDKQFDVVYVYRLDRFFRKAKLLLDAIDKLTEASVGFRSITESFDTTNSTGKFMTTLLGAVAEMERDTIRERTTNGRTMAAKSGKWVVGMPAYGYVKNEETKKLEIVESEAEVVRMLYNLCIYEKLSLNKIAERINGMGINSPKHVMINKRVTHNFWWERTIGRILTNEIYAGVAYFRKYKRPYKNLTSILEDDLKRPESEWIEQKVPPIITRDIFDRATKQLTQNRNNADRNMQRSYLYSTILTCGYCGFKMFSGYQPPRKGKHTDKTGRYYHGVYRKKDMVGTTKRCPTCPQYAESRLEPIWETLVDILKNPKNLREPLERYSFKVVDADSIKIKQTRNNDKIKDLDSKLKKLAVLFVNNESVELADFKKMESEYSNEKEKLINDNLKLGQSLLTKKDTKNREVVLEELYEKIKDKLDNVSYEDKKYIIHLFIERITLHAKSNYAEVIFKFPTTTVISNTTLDVSQPNMPLFLNVKTYSENEIRSMCIKANPLMGNHKVETTISK

SEQ ID NO: 6885 - protein, 571 aa, unidentified
  source 1..571: note = uncultivated organism
MFKNSVDKENIAVMYLRLSKEDGEKVESNSISNQREIINSYVKRNQITMVKEYVDDGYSGANFDRPNFKEMISDAYDKKFDTIIVKDLSRFGRDYIEAGKYIQRIFPENGIRFISVNDNYDSKSADMNDTHLILPIKNFINDSYCRDISNKVKSSQKIKREKGDYISAFAPYGYKKSEENKNKLVIDEQAAPNIKNIFDMKLLGYSSKAIADELNRLGVLTPRKYKESQGFKCNGFQNIKGGNWSAKAVNRIIENEVYIGNTLQGKSITLNYKNKKQIGKDKEEWIRVEDTHESIVSNEIFAIANTMLKRDLNNSRGKDKIDIFTGMLFCKECGSSLIRRTVKYKGREDVFYICSKYNKEKSCSRHSIKEETLIKAVSKIIKSYIEFNEKLYSKVQLIDINRNLKDSQIPILKREKSMTEELLSSLYIDLKENVISKEEYQLFRKNYTEKLIKLDESIQYRLKRQENTKYKIDENKSWIMDINRYKNLSEIDRLSVVMLIDKIFISEDKTIDVRFNHTEELSLLEEMTKADKIRFNNVIAEKSIVTNGNPKAIPAVMNKSLVSAESEVCYG

SEQ ID NO: 6886 - protein, 555 aa, unidentified
  source 1..555: note = uncultivated organism
MESAVIYARFSSYGQNEQSIEAQVNICTEFAQGKDLKIVNVYTDKARTGTNDARPAFQRMISDAASGNFKYVIVYMFDRFARNRRDSIVYKEMLKDKYGIRVISALEPIADDEGGEFYEMFLEWNAEKYSKRLSKRVKDGLDISCANGTYCGGTLIYGYKIELEDIPGKPGKYIKRVAIDEEAAAPIRLAFELYNKGYRKREVLAEINSHGWKYKGRPFEMHQIDNWLINPKYTGEFVFGGRLNTNMYPPIISKETFEETQRRLKLNWHGKQGKDKKTPYLLTGKLFCGKCGSPMTADGGTSKDGIRHTYYTCNGRRAKICDKNREPKDYLEETVTGAVIDMLKDKENLEYILETVINYYNKRTDIKNIKSIETQMANIRIEIDNMANAFINAKSKMLRDSIEKKMAEREQLYIDLETQHDMLELERGYEVKKETIFAFVQDLIDGDIYDKQFQRKIIENLVAKVYIYDDDLILFLNIKCNSQMQEIPFEDLQLDKAVCVPKDSPLARQLKLYLNMRVQIEFFFCLNTVDNCDRIKSIKYSERSEWVWRGRGMRW

SEQ ID NO: 6887 - protein, 513 aa, unidentified
  source 1..513: note = uncultivated organism
MRCAIYTRKSTDEGLDSDFSSLDAQRESAEAYIASQRSEGWTCLPDRYDDGGFTGGNMERPALKRLLDDIKAGNVDCVVVYKVDRLSRSLLDFSRIIETFEVHEASFVSVTQQFNTSTSMGRLMLNVLLSFAQFEREIIGERTRDKMAAARRKGKWTGGQPILGYDIDRQAKKLIVNKKEAKLVRLIFETYLQAESLTRTVAELDKRSIRTKVWTSMKGRLHGGRPFNRITLYRLLTNVAYIGKVRFGEETYEGEHDAVLEPDLFERVQAFIGHNGKTYGAYVRNKTGAILSRLLWCPACGTHMTHVLKRKDGGRAYRYYTCISAQKRGWATCPTKSVPAQEIEDFVVERVREMGRNPALVEDAVRQLADIRTARGPEFEAEHARLKSELTGIRTELHTLVDALGRSGADSAAVTGRIVELEERAAKTERRMTEVREQILAIESQTVDVEDLTAALTHFDPVWDVLFPREKRRLLGKLLERVEWYREAGAVEIIFKPVGIKMLAAEAAATKGR

SEQ ID NO: 6888 - protein, 516 aa, unidentified
  source 1..516: note = uncultivated organism
MHKRAAIYIRVSSERQAIDKISPDAQEADCQEYCASRGYTVVGIYRDIKKYRAGGQLVEPSGTRADRPFLKQMLADARNGKFEVMIAWREDRLYRGYRPMLDVLDCMDESHVEIELVKETFDKRLAPVKAWAARMELDARQDRITMGISGRLDAGKVWSTSIPYGYRLNGSAPEINPDESIWVCRIWEWYSDCVPMREIRQRLLEGGAPQRSVGKIPWQIPWIYMLLRKDVYVTGVQLMKWNGRVYEIQYPPLIDSDTARRVYQRREKSKGHPARNIKYDYLGLGIVHCAACNVKMSSYTTRAYKKKGVLTNRMNREYRCGHFLHGYHNPGCPHRISVKRLDEDLWQKVWLLLSEGKNLEEAVEGRLEELRHQEFGVQSEIDRIHAELDKIIDERQWVITQARKRTLTEDDMEYQLGILDSQEKLLKFELADKNLLVGDRGSKLLEFIEQYRKRLAKGLDWLQNEPQTPKAAEKRFKARRKIVEAIVSRVDVFEDKSIKVEFVFDLSDEQIKQPPP

SEQ ID NO: 6889 - protein, 512 aa, unidentified
  source 1..512: note = uncultivated organism
MDAIYARQSVDKKDSISIETQIEFCTKEVQPGGQYRVYKDKGFSGSNTNRPEFQRMLNDIRAGVISKVIVYRLDRMSRSLLDFANLIDFFDSNGVSFVSTQEKFDTGSPMGRAMLSITMVFAQLERETIQIRIKDNYYSRGEKGMFLGGPPAYGFDKVQTVVDGTKLKYLVPNEDTAPVVKMMYSMYGDQRKTLGEIAKHLNESKIPTAKGGAWNSSRVGMILRNPIYVKADVSVYSYYKDKGCNITSSPELFAGTNGCYLYGKRSRSQRKYTSFSDHVLSLAPSDGLVNADLFIKAQIRLDQNKQIDNSNWGTKTWLTGLIKCPTCGRALVPKNCGKDYNYFFCSGKYEHSCSRDSNLGRVRDIEDAVYGRISDIAKGFSSVKVAVQKKDNHDTNLLNAKVAAIDEQISRLIDLSLESGETSARYINEKIEKLDAEKKAILSQIEQLVVKKQDDVSDEDITLLLKEWDNMDNRQRGALASLFLSKVVVSPETNSVELYWKHDFSNAYANSR

SEQ ID NO: 6890 - protein, 552 aa, unidentified
  source 1..552: note = uncultivated organism
MKAKEHYNVAMYLRLSKDDGDFGGGKTESDSIGSQRDLIRSYIRSHKEMELFDIYSDDGYSGANFDRPQFKRMMKDVEEGNVDCIIVKDLSRFGRDYIEVGRLIQKTFPAFCVRFIAITDNFDSLTADHNETSLVLPIKNFVNDSYCRDISQKVKSQKKMKREKGEYVGAFVVYGYRKDPKNKNRIIRDDYAAEVVKQIFAWRIQGMSMPTIAKKLDERGILPPMEYKKCRGENFSTGFSKGGKMSWSAVAVRRILVNEMYAGIMVQGKTETINYKEKKAATRPKEEWVRVSGTHEAIISKEDFEFVQKLAFIDCKPSGKGEKGHIFTGLLYCGDCGGLMFRRVNRYKGKESVSFICGSYNKRQGCTRHTTKEEDLKAVVLDAIQSQVRLFLDRETVLNRLNQMEIGFDEVVRFDKEIKRLYEEQEKYGSLRSALYEDLKRGILTEEDFKNFKEIYEGRYQEIQKSIEKQEQAVKDLFKSKVESGARLERFKEVMAVTECSREVLVAFVERIDIYEGNRMEITLKHKELFQKAAMLEEYVCDRMSRKERGVR

SEQ ID NO: 6891 - protein, 521 aa, unidentified
  source 1..521: note = uncultivated organism
MKVAIYCRLSEEDRNKQFETDDSNSIQNQKTMLLQHAMEQGWELYNIYSDDDYAGADRRRPEFNRLLRDAEQRKFDIILCKTQSRFTRELELVEKYIHGLFPIWGIRFVSIVDNADTANKGNKKSRQINGLVNEWYLEDMSENIKSVLTNRRENGFHIGAFALYGYKKDPDQKGHLIIDEEAAAVVREVFTLFAQGYGKTAIARMLNDRGIPNPTEYKRLHGLRYQQPKAKNSTLWKYFAISDMLINEIYIGNMVQGKYGSVSYKTKQNKPRPKSEWYIVEGTHEPIIDRELWDRVQALIAQRAKPFDVGTIGLFARKARCANCGYVMRSSKSAPERGGKHFLQCSNRHVAKDACIGSFISVDKLERLVIDELNRLSAEYLDKDELEQNIEFCDNLQEQKARLRSDLTAYQKKVTEYSKGIRELYMDKVKGLLSESDYVEMSKEFTTERDRLERVIADGEQQLAEIEEKQAAGDNRRELIEQYTNLEHLTREIVETLIDYISVGKRIPGTRDVPIEIHWNF

SEQ ID NO: 6892 - protein, 556 aa, unidentified
  source 1..556: note = uncultivated organism
MSAPPVRRCAVYTRKSSEKGLDQAFNSLHAQREACEAYVKSQAGEGWRAQKDVYDDGGISGGTMERPALKRLLAEVAAGRIDIVVVYKVDRLTRSLADFAKMVELFDAHGVSFVSVTQAFNTTSSMGRLTLNVLLSFAQFEREVTGERIRDKLAASKAKGMWMGGLPPLGYAPDPTPGARTLVIVPEEADLVRRLFTRHLELGSVNALRRELDAEGTVSKRWTTAKERSMGGLPFSRGALFHLLKNPIYVGEIVHKDLRHPGLHPPIVPRELFDAVQARLADQAPERRPRTVRAMSAPLKGLIHDALGRPMSPTFTRASGRERINRYYVSAPVQQGRRSAAAENVLTRVPGGIVEAFVLERLRLVCRQGGPDAGWAELTPALRRVEISHDAVRIEVAAASVIRDGADPGAEIAQVARRLAPTERLSPAPQDPLTLQLFSALRLKRRGGRTSLTLPTGTDPIDRPRPDAALISGLRRSHALKRKHQLRGQAGVVATAPETRYLLRLAAAAFLAPDLQAAILAGRQPTALTMKRLIHTPTPLAWADQREAFSGHARRT

SEQ ID NO: 6893 - protein, 555 aa, unidentified
  source 1..555: note = uncultivated organism
MKTVRCAIYTRKSSDDGLEQEFNSLDAQREACAAYVMSQTGEGWKLLPDRYDDGGLSGGTLERPALQRLLAEVKAGGVDIIVVYKVDRLTRALLDFAKLVEALDAAGTSFVSITQSFNTTTSMGRLTLNMLLSFAQFEREVTAERIRDKIAASKSKGMWMGGTPPLGYRPEGRSLTIVEDHARLVREIYARYLELGNVRLVAEQLVADGIGAPLRLSGNGQSFGGCSLTRGQIYYLLKNPIYAGDIPHKGTIFPGLHDAIIEREKWDQVQARLAANAQGERSTRTRNVSFLTGLLHDADGEPLVPVHTRKAKHQYRYYVSQFLQHGTKLGARTGIRVPAREIEQVVRQEMTSLMGDPLLLAHACGLVVRPEMLAQINQDFADALPEILRSNAKLAGIISRIIVHTNRIDIELALAGISMLFGVSASHHTQQTFTQSVSVRLTRTGQVVRLVHDNGVAALKQADPSLLRLILKARHWWNELAKGEITIQILAVRESVSPSYITRVVRLAFLAPDIVDAILAGTMRASIDGVAMVRTGAVPGKWDEQRLRFLSAVGG

SEQ ID NO: 6894 - protein, 519 aa, unidentified
  source 1..519: note = uncultivated organism
MNAQRTVQIIRPSSELSTEDQKIKAAAYCRVSTDSDDQENSFLAQVKYYSDYIGSREDMILVDIYADEGITGTAMSKREEFKRLLNDAKLGRIDRVFCKSVSRFARNSLECIESIRALKDCGTTVVFENDNIDTKTMNSEMVLYVKSAFAQSEALAGSARVSSAYRMKMENGTFTTYCAPFGYRLVNGNLEIMPEEAEIVRKIFNMYLSGLGINSISAKLNREAIEGNGRQWNNTAIRYILTNEKYIGDSLTQKHYTPPMLPLRCIRNKGERDKFYISNTHEAIISRNDFEAVQKLLSDRNIKTIQTRKRYLFSHMIICSHCGWSYRRKVQNDVIYWVCSRKSISGFDCDSPNLTEEAVKKGFVKAYNKLRTYEKEILDKTIADLSELQNKRTRGNAEINQIDSEILRLSEQNSRFENFRSKGILDEISFMEQTNRLRGRLTELRNRRLKLLQNCEEESIIENLSHVKEDLEENPKALIDFSEEIFRAIIEKIIVEKDGTVSYRLKGGIKLNEDITEVI

SEQ ID NO: 6895 - protein, 563 aa, unidentified
  source 1..563: note = uncultivated organism
MQAGKPKTLRCAVYTRKSSEEGLEQDFNSLHAQREACESFVRSQQGEGWRLINTHYDDGGFSGGTMERPALQRLLEDIRHKLVDTVVVYKVDRLTRALSDFAKMVEVFDARGVSFVAVTQQFNTTTSMGRLTLNVLLSFAQFEREVTGERIRDKIAASKRKGMWVGGLAPLGYEARDRKLEVLPSEARTVRHIFQRYCELGSVRLLKDELDRGGVRSKVRVSKHGKRSGGESFSRGALYTLLRNPIYIGEVRHKGTRYPGLHRPIIERAVWDKTDELLHTHASRARGTATKSMRSPLAGKIFDESGKLLTPSHAVKGKRRYRYYVSRNLLVGTAENAERGWRIPAPEIERSVTDAVLTILEDRPGIATELEHLDCNAFQMKSALEAASSWSSRVRSEIEATGALAVLVDRVDLSADGIRLSIRLPLESAENRMAHAATHLSLVRIIPMLMRRRGVEIKLVIGGDRELSRGNDPALLKLIARAHSWFDELVTGRAASMVEIGRREKVGKRHVSEIVRLAFLAPNIVEQIVTGVQSPELTAKALLHKSSRLPLDWETQQKYFGIP

SEQ ID NO: 6896 - protein, 507 aa, unidentified
  source 1..507: note = uncultivated organism
MEKYDAIYCRQSVDRVDSISIESQIEYCQYEVRGGKYKTFTDKGYSGKNVDRPEFQSMMEAIRRGEVSRVIVYKLDRISRSVMDFMHLFTEFQQYGVEFVSCTEKFDTSSPMGRAMLKIIVVFAELERETIQQRVMDAYMSRSRKGFYMGGRIPYGYKLEPFTIEGKKTAHYAIIPEEAEVVKLIFSMYAQPQTSYGDIVRHLEANGIVNSRTKDGAWDRCRIADMIKNPAYVRADLDLYRFYKDQGSVLHNDPDDYIGTFGCYLYSEKGAGRKQCHLAGQHIVLAPHEGIISSDIWLKARIKCLNNQQVTKPIKATNSWLAGKLKCGKCGYAMTIRKSPLKTRVLRYYICSHRMQTNKCEGVSGMRADEVEAFILQEMINHVKQFEVLAQSQKRPENPQIHEINVKIEQIQQEIDKLLDKVTSANDVLMEYINKKIVELDAQATTYRQKLAELSPLDNTPQTSIKQIKNCMEHWDDLSFDDKRAVVDQLIVKIKITEDTCDIEWKF

SEQ ID NO: 6897 - protein, 520 aa, unidentified
  source 1..520: note = uncultivated organism
MTRKKKETSPKVRCAIYTRKSCEEGLEQEFNSLDAQRASAEAFVASQQHEGWVCLPQRYDDGGFSGGSMERPALARLIADIEAGKVDCVVVYKVDRLSRSLLDFARIMEIFERHGVSFVSVTQQFNTTHSMGRLTLNILLSFAQFEREIIGERIRDKIAAQRRKGHWAGGVPVLGYDVDRSTASPKLVVNGEEAVRVRRIFGLYLELGSLLPVVEELRRRGWCNKAWTTKKGLPRGGRPFDKGSLYALLTNPIYIGKIRHKGDVYDGQHEAIVDAGVFEEVQRRLRKNGRGRGNHLINKYGALLKGLLYCAACGRAMSHTSCKRGTKCYRYYTCNRAIKEGRKQCPTGLIPAAEIEEAVVDQIRCVASDEGLQAEVVRQGRLASDRQLTELAFEQKQLERQLARDEAELSRLIETPRPNAVTTARVAELERRTARARVRLRELRAEKDAVTRRRIDAADVAEAFADFDRLWESLTVRERIQVLTLLIARVEFDARDSTIAVTFYPTAIKTLAADGREDAA

SEQ ID NO: 6898 - protein, 624 aa, unidentified
  source 1..624: note = uncultivated organism
MKRQDRKTDLRRCAIYTRVSTEYGLEQEFNSLDNQREASEAYIKSQAHEGWKLIRDRYDDGGFSGGSMDRPALKKLLDDVRARRIDVIVVYKVDRLTRSLADFAKLVELFDEHEVSFISVTQSFNTTTSMGRLTLNMLLSFAQFEREITGERIRDKVAASKKKGIWMGGAVPIGYRAENRALHIVEEQADFVRDLFRRYLEVGSAVRLKSVLDAQDVRLPIRTVGTGRATGGGLISQGHIYHILSNPIYAGRLRHKEQIHDGQHAAIVDDDVWGRVQVLLANQTQTRKPASQDVHSFLAGKLFDDRGHRMGPSHAAKGGRRWRYYISRAVLKGRKQDAGSVARDPAAELEKQVLQAIKRLLPAVEHALDGSGGSVGHFISTPSNSALAANIPSSTDPSSFEDRARSTIGRVTIGERGIELEAVKRRLPAVEHTMDGSSGSVGHSISNSSNNMQAANSPSSAVQSSFDDRARGAIERVTIGKTGIEIELSDATVVEGARIVTIPWTLPSPHRRREIFQGEDGPSSTIRPMRVRDRAVFAEALGDAHRWLDELTRHPDWTTTAIAIREGKTERSIRMTLSLAFVAPPIVAAAIEGRLPRGFGVKRLMDLPMLWSHQWTALGLAPPA

SEQ ID NO: 6899 - protein, 599 aa, unidentified
  source 1..599: note = uncultivated organism
MANDNVKIRKATKKVMNRNKGTHLSTLRVAAYCRVSTDDKEQLVSYQSQLKHYTDLINDNPAWQLAGIYADEAITGTSAKKRDDFQRMINDCMNDEIDMIIVKSISRFARNTVDTLQHVRMLKERHISVFFEEENINTSTMDGELLLTILSSVAQQEVQNISEHVKLGLSMKMKRGKMVGFNGCLGYDYQKKDKTITVNAKEAEIVQYIFNRYVEGAGGKVIARELKNLGYKNKRGQTSWSDNGIIGIIKNEKYKGDLLMGKTFTVDPISKRRLDNLGEADQYYIENHHEPIISRQLFEQAHQILNKRRGSYSRADGNGKRDKFSRQFSFSCMLKCGFCGSNLSRRKWNSGTEYEKTIWQCVTATKHGKRECPYCKGIPETLIEEAFVRSYNMLCNNDQSFVGSFLERVKQALMEADNSREMKSLEKEIFQLKERKSSLVDMRLDDKIDEETYQIKLTELLDKMDKLNDRKKELLQLRSEQQDINKRLLEFQKVLINHDVLKEFDRHVFECIIDRVIVGEKKETGEIDPYKLKFIYKTGVENEVAVKQPFSFDNSCSQTVDDYGRMSLQGDNDTRGDVRTFVPQKPTNISTVLINRKIE

SEQ ID NO: 6900 - protein, 537 aa, unidentified
  source 1..537: note = uncultivated organism
MVEVKPVRCAVYTRKSSEEGLEQSFNSLHAQREACEAYILSQKHEGWQLIPAPYDDGGYSGGSMERPGLKALLADVEAGLIDTVVVYKVDRLTRALSDFAKMVDRFDARSVSFVSVTQAFNTTTSMGRLTLNVLLSFAQFEREVTGERIRDKIAASKAKGMWMGGSVPLGYDVVDRQLVVNEPEAAQVRELFALYLKFKSVDDVVTAAAAAKIRSKQRLSAAGNTTGGSRLGRGSLYAILANPLYAGEVGHKGKRYPGQHQRIVEPDVFEAVQVLLAGNRRKGLGTAASTASSLLTGMVEDHSGTRMTATYTGKADRRYRYYASTLTRVPADELETLVGAAIVDALGSPARLASVLPSLDLLTAAVIDKATSIAGAWQQRDHADRRHLATQLIERVQVTGTGVLVVLNLKPIGSAGTAEIVVPATIGKAKARLSLVVPGSAAPKPDQSLISAVAQARRWLLLLTTGKCTSIGGIAAADKVTPGYVRQLIGAAYLAPDIVTRIVEGRQPAWLTLASLKDMMPLPADWAEQRQLFARQN

SEQ ID NO: 6901 - protein, 537 aa, unidentified
  source 1..537: note = uncultivated organism
MIAAIYSRKSIFTGKGESIENQIELCKEYGERLDISEYLVYEDEGFSGGNTNRPQFQQLLKDAKAKKFNVLICYRLDRISRNVADFSSTLEMLQQNNIDFVSIKEQFDTTTPMGRAMIYISSVFAQLERETIAERVRDNMLQLAKSGRWLGGQEPYGFAAERITYVDAEFKERSLMKLTPLKEELDIVKLIFGKYLETNSISQVVKYLNLANLKGKNGGEWATMQVRRMLSNPLYVRSDEAIDSYLRSIGMNVFGEPNGNGYLTYNKTKNMTIDRDITEWIAAIGKHKGIIDSNIWLEVQKILESNKDKKLPRLGTGDNNALLTGLLKCKNCKANMKIKQGHKSATKEGIRYDYYVCGAKDSSYGTKCKNSNVRVDRLDKLVINEIKAYSKELLIEELSAALNNEINDNVLPTQIEKIEDTIKTKEKEISNLVKELRKDSDEFTKEYIRKDIKELHDEIANLQSKLQELENNNNAFSEQVDNTQLVLDSLEKFNSEFDVLEDIQHKRNLLRTIVQYVTWDGSAKEFKVKLFNGDKKK

SEQ ID NO: 6902 - protein, 617 aa, unidentified
  source 1..617: note = uncultivated organism
MSEQKKYRCAIYTRKSSEEGLEQDFNSLEAQREACEAYVRSQAHEGWWLVADRFDDGGYSGGNIDRPALAKLMDLVRDGKIDVIVIYKIDRLTRSLTDFARLAETFDKHGVSFVSVTQQFNTTTSMGRLMLNVLLSFAQFEREITGERIRDKIAASKKKGMWMGGPIPMGYDVKDRQLIVNEEHAKSIRRIFKLYLEEGTVPALLERLVRERIRTAPRISAKGTSSGSRQFTRGHIYKLLSNPIYIGRIAHKGTSHPGQHQPIVERDLWDAVQAKLSHNTQGHRVRRERAPRRSALLADRLFSQAGNRMILTHASKAERRYDYYVEQLGTSRAQVASDAGVLSDEPRETDDLAPFRGTNRATVLRLPAAEIDKTVIAAISNLLGEPAKLIEHLGELSADEARTAVDNGRSLARRIDRRGDELRSVIQRVIASRRQLSIEVDCDTLRRVLGLEPTERNEQGNPGTTIHVPLTYRRRGRQVALAIGSKATNAETRIDTTLVTAVARAFDWFERLSTGEARSIGELAQSDGFDAAYVSHVLRLAFLAPEVVQQIVAGKHGAGLTADQVIWHSDISPIWTCQASVESKPGDGPLCAKNRSCHGPVTKTADVAGSVQARLLE

SEQ ID NO: 6903 - protein, 545 aa, unidentified
  source 1..545: note = uncultivated organism
MNDKQQKKTALYCRLSVDDGRLGESISIESQKILLVQYCKDHAIKNYEIYDDDGFSGTNFDRPGFIRMYDDIQKGLIDTVIVKDQSRFGRSYIQVGMYVEQFKDMGVRFIAVDDCYDSSQTDYDMMFPMRNVINEYYAREASKKTKSAKKAKAKAGQFIGSKPPFGYKLDPNDRHHLIVDEPAAEVVRRIFKLASQGNGFTRIAKILREEKVLTPIAYFNLHNPDYFKSDYWRQEFDWHCESVRVMLNNEVYLGKLVYGKQRNKSMKSKQKVKNPKEEWIVVENCHEPIITQEIWDNVHKLLSSKHREIKTGEVQMFAGLVKCADCGHALTYSQKQRADGTYHGSYSCWMYKTHGKEYCASHYITFDDLYAVVFADIQRVIRSYEYDADRFRQLLDSRCSSNADKKIIALTADYEQKTSRIAEIDKVLNKLYEDSALGKIPESRFEIMQQTYDAEQETLRKELPALKAEIDRLKEQTDAADKFINVIRKYTYLNELTAEVLNSLIDKIVVHHKEVGSDGKEYQQIEIHYRFIGRLDAAEQVKKIA

SEQ ID NO: 6904 - protein, 537 aa, unidentified
  source 1..537: note = uncultivated organism
MLANEKQEKKTVNCAIYTRKSTTDGLEQDFTTLDAQRESCESYIASQKNEGWIAIPEKYDDGGFTGANTDRPALQRLIADIKAGKISCVVVYKVDRLSRSLLDFAELLSLFEKHDVAFVSITQNFNSSTSMGRLTLNILLSFAQFEREIISERTRDKMGAAKRKGKWIGGRPALGYDIDRDKHKLVINPKESELVREIFDLYITKRSTLAVTMAINDKGYTTKSYTTQTGRKFGGIKFSTNATNRILKLVLYTGKVEYQGEIYPGEHEAIISNETFKKAQGVIAENKPDWKTTRKARHVGLLTGLLRCKACDCSMYFSYNIKASKYRYHYYLCMSASKRGYKTCPTRLLSAQRIEQKIIELLRTLTSMPKLDEKVWDTFSLQDKIAIIKTVLKEASFDGNKGILEIVLLKDNKRRQYKVELKELKNLPVPPNQVDIKKEPQLRQNLTLAHQIQEVMAEGRGKSLKQMAGWLNISHVRICQITGMLLLAPEIQEEILFSDDKLLFEIPEYKVNEITKELNWEKQKENWNILINNPAAS

SEQ ID NO: 6905 - protein, 520 aa, unidentified
  source 1..520: note = uncultivated organism
MKAVIYARFSSEKQNEASIEGQLRECMDYANFNNIEVIGNYIDRAQSAKTDNRPNFQKMIKDSYKRMFDCIIVWKLDRFARNRYDSAYYKNVLKKNGVRVISAKESISQGADGILLESILEGYAEYYSAELSEKVKRGMTENALKAKSNGVRPPFGYYVDETDHYQIDETLAPIVKEIFTLYLDGMRVNDIAKRLNERGIKHKGFEMKYNAVFRILTNRKYIGEYKFGDIVIPNAIPAIIDEATFNSVQQRMARNKKAPAMHRSEDDYLLTTKLFCGKCGAMMTGVIGTSHTSRQYRYYKCNHSKQGKCDKKTVKKEWLEELVLDEIKELLSSDEVVEELADRIYELQLREDNTATSIQAQLTGVETKLNNLVEAITQGIYSSTTKKALDELEERKRNLEIELFEAQTRNPVLTKEQILFALYNFRKIDISTQEGKQRLIDCFVNSIYLFDDHFVITYNYKGQSKTVTFEELNSSPLTSKGSPCDKILKKSIRGRNEKATGTVCGGAYAFAQRQRHVRQL

SEQ ID NO: 6906 - protein, 543 aa, unidentified
  source 1..543: note = uncultivated organism
MELFYCYAYGRLSKEDGDKIESDSIKNQRDLIHSYIGQHPELKLVMEGYDDGYTGTNFERPCFKEMLEAVKEQKVNCVIVKDLSRFGREYIEAGRYIEKLFPALGVRFIAINDGYDTAHLDASSSLILPFKNLINDSYCRDTSIKVRSHFDVKRRNGEFIGSFAAYGYSKDPENKNRLVVDPEAADVVREIFARRISGMSCQAIADELNTLGVPSPMEYKRSRGMKYKSGYRVHNKTRWSATAVRRILQNEVYLGVMEQGKRTTPNYKVKTVVYRPPEEWMRVEDTHEAIISREDFDLAARLMRTDTRTAPGKKAVHPFAGILCCGDCKGGMVRKTTYYDGKTYHYYGCITHRSDTAACSPHTISEAKLEQAVLEGVNLHIRTVIELNGALEAIARRPLQKVAAEKLDKRLEALRQELVTKQDIRDSLYRRYASGEVSRADFHEFKRIFTRDCEEVERAIEAQQQELDRMLESSTPDSPWIQHFKQFGQLETLNREVLVRLVERILVYEGGRIEIVFRYQEQFANAMIFASEETARQPLREAV

SEQ ID NO: 6907 - protein, 550 aa, unidentified
  source 1..550: note = uncultivated organism
MKKTYHAAVYLRLSKEDGDIEIGDKRESNSISNQKDLIMEYLQEKPEIEIVSVRTDDGYSGVDFNRPEVQEMFRDIEKGIIDCVVVKDLSRFGRNYIEVGKYLERIFPAKGIRFIAINDNYDSANRDYSQDIVMAFRNLINDSYLRDLSIKIRSHLEIKRKNGEFIGAFVCYGYLKSEENKNRLVIDPFAAEVVRDIFRMKMDGMSSYAIAEKLNELKILSPMEYKKSIGLNYETSFKAHPQAAWSANAVLRILTNEIYTGTLVQGRKTTPNHKLKVRKAKDEKEWARVENSHEPVIDRFYFEAVQRILERDTRTSPGEKYVYPLCGLVYCGDCGSPMIRNIKRSGDRKYFYYICKNHRETKQCSSHRISEEELLAVVFAEIQIHIKSVLHMKDALERIREAPARQMEIKRIQEHILKKEEELQRAERLKCGVYEDLKDELIDVDEYRILKAEFEKRIASAREAIEKYQEKQKEIQNNCSSRYDWMEYFTEYKNIPELTRRIAVIFIDRILIYEENRMKIVYTFQDEFMEILSRLTETGEVAAGSSPERG

SEQ ID NO: 6908 - protein, 516 aa, unidentified
  source 1..516: note = uncultivated organism
MKPPIKRCAIYTRKSSEEGLEQEFNSLDAQYESCLAYVTSQKAEGWIAIKGRYDDGGFSGGNLERPGLRLLLADIESGKVDTVVVYKIDRLTRSLMDFAKLVEVFDRHGVTFVSITQSFNTTTSMGRLTLNVLLSFAQFEREVTGERIRDKIAASKKKGMWMGGYAPVGYNIADKKLVMDPESAPLVQMLFERYHALGCVSALKRELDREGITSRVWSSSTGLQHGGASFSRGILYKILRNPVYIGQISHKGIIYEGQHEAIIGNELWNKVQAQLIGHGARSRGSPSVPMSGLLKGKIFDPDGRPYSPTYTSKGNRRYRYYISQNLLQCRDHPKGILARLPAQELEDTVLNGIMSIFTENRLAALFGLEVHDARIRYIIANKTLINNQKLFELCLSRVTLQTNSLLLELNTEVLKNQFDEALALDMPYPAVALHHLQIPFVVGRAKTGSLLLAAPRTAAELNDPFNQPEEEIRRWVQGIIWRDEHFRGLPIEQIAKRENVSSTQIHRLINLTFEMA

SEQ ID NO: 6909 - protein, 513 aa, unidentified
  source 1..513: note = uncultivated organism
METWNTAGYLRLSREDGDKAESDSIANQRKLLEQYLAARPELHLVEFYQDDGYTGTSFDRPAFRRMEADIEEGRINCVLVKDLSRFGRDYIEMGRYLERVFPARGVRFIAVNDHVDSRQGRYDMLLPMKNIFNTQYARDISDKVRSAIHTKQQRGEFVGAFPSYGYQKDPANHSRLVIDPAAAQVVRRIFDLFEQGWGKIKIARQLNAEGIPSPSEYKRILGERYHNGRKIGQTTYWTYATIHRILQNQMYAGNMEQGRNCRPTMHGRAVQLERSKWAVVPGTHEAIIGAEQWERVQALLRRRTRQLSFEQNQSPFAGFLRCGDCGRAMVKTRTAGEIYYSCGSYKRYGPTVCTRHSISHAVLEGIVLSDLNRVVSAVQDLRALAEEAEKQSPSVRTGQRKRLEGGLERLCRLKKSAYEDYRDGLIRREDFLCYRTDYERQERELSAQLRQLEKAQEEGLLFDPWVQSLLQHGRLTSLDRITVAETVKQIQIFEDGNIEITYAFSNKCGLLPE

SEQ ID NO: 6910 - protein, 763 aa, unidentified
  source 1..763: note = uncultivated organism
MTRVALYARVSTEMQAEEGLSIAAQLAEMREYAHSRGWEVVAEFIDAGVSGSTIDRSGLRALLQAAEERAFDVVLVHELSRLSRSVFDTFNIFNKLGRYRIGFASVKEPQFDLSEPYGRMFLGIISSINQYYLDMLKFHTKKAKRQRVRQGLYNASIPPYGYKHTGDARTPPVIVEEEAKVVRLAFEAYASGRYSYRKIAEMLNSRGYRTRSGRRFSKDTIADMLRNPFYVGKVVYKEGLRSQDVGEIYQGLHEPIISEDLWNAVVKVRRRQQHTSHRFQFQIRPYLLSQLAHCHVCGRRLRAQGAQTGSYYREVSYARGFDDCPYGQVGAHIEPLHEQIGAIMRLLRLPADWQEELAAMIGPNEEVSTLENRRARLIAERRRLKRAYLRGDFDGEDEDIYLETLREIRAELDKLPSEDELRQIREAARTLESVGEVWDEADEADRRDLVRLVLRRAQVDVVQDRVVLLEPLAPFIPLFRSIPLVEEREFGTFTPVWPLNLDLTLPCPRLPPLTELPDELAQVPFLPLWPWEPDPEARISPILSLVLKERRKEGREGGVAVSVLRSGVPLLKLDERKWPGVTLERLSLAEVLTREEDSVIFLAAPLAVQAHPDRENLAERVFRLLEEGGYWYIIDVVPASMPAHWVFRFFPQAWPQARRVYWSGYDFYNVLQRVGFQVKQEERTFYEPVSAGVALEIVRRRPGLLDDMPNEVYEEGLRRLEEAAEEGTLIASEVTLVVILARKGEREVKRFRRRKLALDRVRG

SEQ ID NO: 6911 - protein, 557 aa, unidentified
  source 1..557: note = uncultivated organism
MAFMRYSDKEFYKAAAYMRLSREDGDKVESDSIQSQRALIKESIKKKENIQLIDEYVDDGYSGTNFDRPAFQKLLEDIGKGRVDCIIVKDLSRLGRNYIETGRYLEKVFPLLGVRFIAITDNYDSAEKSSDADQIIIPFKNLINDAYCRDISTKIRSQLDVKRKNGQFIGSFASYGYTKDEKNKNKLVPDEYAANIVRYIFDLKLDGLSSYDIKDKLNELGVLTPLEYKKLCGFQYNSGFRSKSNPEWSVTTVNRILRNEIYTGTMVQGKHKKISYKVKKSKDMDEANWIRVENTHDAIVSKAEYDLVQILLSRDTRRSPRKDAVYIFSGFIKCGDCGQNMVRRISNKNGKPYAYYHCSTYKAGDGCSSHIISEKHLEELVIECIRQQVAMVTEAQKILDSIEAQPEEQLGVVLVDKQLAAVVAEVERYKDLKVHLYQDLQDGLISRGEYQELNNQFSMKLKKATDNEKALTDKREELLKTKITVRPWIEEFKQYGNIESLDRKTIVSIIDQIVIGNKNQIEIVFRYDNELKLMIDEARHLAGLKDGSSYERQVMAV

SEQ ID NO: 6912 - protein, 546 aa, unidentified
  source 1..546: note = uncultivated organism
MDVRYVQEQTIPETEVIIIPATKSPKEKKKQGKRRVAAYCRVSTDDEEQLTSYNVQIEHYTEVIESNPNWKFAGIFADAGITGVMAKKRDEFNRMIELCRDKKIDHILTKSISRFARNIVDSIKYIRELKALGISIYFEKENIDTGEMTSEMMVALYSVFAQAESESTSNNVKLGKRFNYKAGKVPMMYGNILGYRKGKDGNPEIIPEEAKIIEIVYTKFLEGYSYQGISEYLAKNGYKTKKGSSEWKRSAIQGILRNEKYRGDVLVQKTYVADLFTKKTVKNTGELPMYLIRNHHTPIITPEVFDRVQVELARRNSLKPVSDKNVSKKSRYNSKYALTGLVVCGNCGSKYRRTTWARNGKAKVVWRCINRLDHGTKYCKDSFSIEEERLHAGVLKAMNSMLDNTEKIKALMKGSIAELLSAPNTVMQIHGLESSIKAKNNEIVEIIRLGVENRETRESIDEKCRQKHDEVSKLQAKLNAVTAKSQIENTQTSQLRAIYDTIDKLPGKFVTFDDSVVKSMVTRVKIISKEKIEVTLFDAVTLTVNI

SEQ ID NO: 6913 - protein, 528 aa, unidentified
  source 1..528: note = uncultivated organism
MKTQRCALYTRESSEDGLEQHFNSLHAQRDACAAYVLSQAGEGWIEVPTIYDDGGFSGGSMDRPALAQLMTDIGKGLIDVVVVYKVDRLTRSLADFARIVELFDSKGVSFVSVTQAFNTTNSMGRLTLNVLLSFAQFEREVTGERIRDKISASKKKGLWMGGVAPLGYDGIERKLVVNEAEAQTVRQIFKRYLKLGSVLSLAEDLRISGIRSKQRLSKSGKVAGDVILTPSALYHILANPTYRGGIRHKALVYENAHPAIIDQNTWDAVQSMLAGQSVDRPNTPRLAAPQLLQGRIFDGAGEPMTPTFSSNNGHRYRYYVSRPTLPRQASAHPAMRIAMGTVESFVTDQIAPRLENNYEPDLDLISRLRSAITRVTLKPDLVQIRVRAEAIATPQDLPLTQARRDEHEWDISFPIILKARNGAKMIEAPGAPKEAGRIDRAMVRAVAMAFDWAESLAKGELASVADIAARGKFCKTHVAKLLPLAWLAPDLVELIVKGKQPAALTLHQLTARPIPLDWDAQRTVFFSA

SEQ ID NO: 6914 - protein, 504 aa, unidentified
  source 1..504: note = uncultivated organism
MNEPTAYEAIYARQSLDKKDSISIEGQIEQCKRLAESPDTALVYADKGYSGKDTNRPRFIDLIRDIKLGKVKRIIVYRLDRMTRSLLDFTNLLVVFQKYGVTFESVHEKFDTVSPVGQAMVQILMVFAELERKTIQQRVKDNYYQRGERGMYLGGPAPFGFERKTTKHNGRKETRLEPVCAQQTHIAAMYEKYGAGAALSEISKWLNDKGIKTAKGTAWDGGKVSRLLRNPAYVKADADVYAYYIDRGCTVTNSLEDFIGVNGCYLYGKREANQRKYTDVKDHYLSLAPHLGFIDSELWLRCQNRLDRNSQIGNAGQGQHSWLSGLVKCGKCGYCMTVTKYKDYRYFRCRGQDMLNNCDGQSITQYADAIESVVEEELFAKLKSLPKVEMTKDSKSVRGNNAAKARLVELEGKINNLVNNLAECSGVTVTVLSDKINELAAERDAILKTLAKEIKDEIENPYEKIMALADNWAEATMDERKLVASLLIEKVLVADNNITVEWRI

SEQ ID NO: 6915 - protein, 542 aa, unidentified
  source 1..542: note = uncultivated organism
MRTKSVRCAIYTRVSTDQGLEQDFNSLDAQYDASQAYIRSQAHAGWTLLRARYDDGGFSGGNTERPGLRRLLEDVRAGKVDVIVVYKVDRLTRSLADFAKLVELFDAHNVSFVSVTQQFNTTTSMGRLTLNVLLSFAQFEREVTSERIRDKIAASKRKGLWVGGMAPLGYETKDRRIVVVEEEAERIRTIFRSYFALGSLNRVLADLRQRGTVTKVRTLKIGRTVGGIPFTRGPLAYLLRNRFYIGEVVFKGEVFPGEQPAILDRDLFDAVQAKLSEQLNNHTAARAKSESPLIGRIYDDRGNRMSPSHVRKQGIRYRYYVSSPLLQGQARDAGSVCRVPAADVEALIGQAVRENVKDSSSPDGDLIRTHVARVNVQADHLAIELRRPKQGQPPSREHGTVPSRDGGELEADRIVHRVPWKKPPSRRRREIIVPQSTAPQDARPIRAETRAALVASIARGRRWLDEIAAGERARGTLTVEQIAAREGCSIRQVNMTISLAFLAPRLVQAAIEGRLPRGIGVTRLRDAPAEWSRQYAMLGLAV

SEQ ID NO: 6916 - protein, 564 aa, unidentified
  source 1..564: note = uncultivated organism
MDLKTVYRFAIYSRKSKFTGKGESVESQIEMCRQYIAAHYGKNTALEARVYEDEGFSGGNLNRPQFQKMIKDSHESPINAIVVYRLDRISRNIGDFANLINDLSERGIEFISIREQFDTSSPMGRAMMYIASVFSQLERETIAERIRDNLYELAKTGRWLGGNTPTGYESGSVVSVNVDGKTKKAHMLKIIPYEKELINMIFNKFLETESLTKTDEYLLTNKFLTKNGKPFSRFAIKSILSNPVYMNADKDAYNYLTEKNISLFCDEELFNGEFGVMVYNRTLQRRGKAHQIKPMNEWIAAIGKHEGIISGAKWIRVQDLLERNKSKSYKKPRSSTALLSGLILCAECGAYMRPKISKSNNATSNPRYTYLCTTKERSKSSVCSIKNVNGNILDDAVVDIIKQLEEDKEELIKRLKSIRRRVITEKSDYENTVSDLQAKIFEEEQKITALTLSLTNVEGSVAKKYTLELIEKSHNQIQLLKEHLRAIESINEKIRLNDSDLDSVKNILLKFNVCFEKNSIEEKMATVKTFVRKVTWDGRTVHIYIFNCDDEDNLLFTASVETHV

SEQ ID NO: 6917 - protein, 633 aa, unidentified
  source 1..633: note = uncultivated organism
MVSCYVTPFLVPFIKRKGGKSMNNERMIAAVYIRVSTEEQAREGFSLGEQKEKLLQLCAFKGYEVFKVYEDAGISAKDMEHRPAFQEMLQDMRDGKINYIVAYKLDRVTRSVRDLEDLISQLEKYNCYLVCDRDDVNTSTANGRFFVRMLTVLSQLEIEIVSERTKFGLNGAIKSSHLPGPAPLGYKKDGNKKTIVDETTKPVIERIFKLYLEGKSFQQISNIFNKEKLLNPKKWKDTTIQKVIDNKIYMGDYEQYKRIAKKENKEPVIYMNVVEPIISRAMWEECQRQKEVNQRIYTRDRVYLFFQKIRCHTCGRIMKCKGSGGKKKKYMYYNCEKCHLNYREDKIEECLMQFIYDLVEYDMAVKKFFLPILADHKPTKTDDIDKEIKQLIKQKERIKKAYMSGIVEMEDFSEDYKLIEEKLEILEQKKSELLNLDNITFTPQQLMADRYIERETMIRLDTLNDVVKTNWESKTKDEKQEFISKFIESVILTKDKNNELHIEKINFRKSYINNLMRFLDKGILDVLVPVEINGKEEFIIGSPNISNEQVQEYLDRLNEFYETKMYQLYERVDEDTGNIIGEFTPKKDEKIIRIVPISPTEIKTKSIINKEDIETKYGIVTYNPNKPNTKGND

SEQ ID NO: 6918 - protein, 548 aa, unidentified
  source 1..548: note = uncultivated organism
MIKINRVNSYRAIRVAKYIRLSREDGDDRESESVENQRDIIDNYILEHEELIEAGEYVDDGYTGTNFNRPGFQKMLKDIEAEKIDCIITKDLSRFGRDHIDTGYYLERFLPANNIRYIAIGDNVDTIKPDGLQFLTFKLSFNDYYAQDISNKIKSVKQRKIEKGEYQAGIPPYGYKKSAEIKNHLVPDEYSSEIVKEIFDMYVNKGMSTIKIADELNRREVVAPAIYLKIPTYMKRKSVNPNGKYVWLRAQIGKILRNEVYLGSVVGRKFQKVSHKIAKVRCTKKEEHIVLENMHEPIIDIETWNKAQDKLDGYTKIRDRKYDHPLKGLVYCMECGNKATIRCREEKRKNGTVWKGTYFICSKRNNYSGLCDCKQISANLIEEAVNEKIKEEVQKINFSEKEIKQIYEQAEKKAKSKSNLLQTKLQELKYILKNIENTIEEIYEDKVNKIIQIEDFKIIYEKKQKERNKILKEIKEMETQLEESDKKTLEFDFKEIKQIVNEFLKMKKTNKMILEKLIEKIEFDKEKNIKIKFTFQKYPNVRMKWVYK

SEQ ID NO: 6919 - protein, 562 aa, unidentified
  source 1..562: note = uncultivated organism
MLKRVRILLRVSSRQQLEADGDLTVQRALVEEYVKKHEDWKIDYEYFEGDESAYSNTTKSRDILQQIKEDAKKHKFDILVAYKDDRLGRLLWDSSIYIMELKKYGVDVYTVKDGLITPQNDDVMGQLVLALRYGNAQKASADTGMRVKDTAQKLVRKGKFMGGKAPYGYHLELSGEISKHGRALKHLVIDPRQAEIVKKIYNLSYYKEFGSSKIARILNEEDRNMAPRDLWKGGTITSILKNPVYAGYTVYKRREKVNGRYIRLDSKDWIFSEKPDKEIQIIDPEFWNRVQDKRQKRNFRYNTPTPEDVTVIEKNVGELPLIDVIHCGYCGSKLTNGTKYDYWTIKTTGERKCKKRPIYRCQLANNGVPHQSPRQYRAEKIEPIVFEQIANYIGKIQENDNILQHMKNCNMDKVKEKTKEVQIQKKALRKAENELDVMESHVPEAMTGEYIIKLEELVILIRKQKDKIEKIKQCIEIKTDEMEKLRVSSQEVEELQQQIPTWQDVFLNADASTKRVLVNKIIERIDVTKDKITIKFRINLEGKSEPRIMSDSDTIQYILYSK

SEQ ID NO: 6920 - protein, 577 aa, unidentified
  source 1..577: note = uncultivated organism
MKTTNTSKKLRIAGYVRVSSVRQATEGDSLQAQQHEIEQEIEFRKRRENWDIESLEFYTDAGKSAKDQNRPELQRLKRDIAAGEIDIVICFKLDRITRSLKDFVDLWELFNKHKVDVISLREKFDTSMPTGEAMIQLIMVFAQLERKMTAERTASIMRDRVERGLWNGGHILGYRSRPQEPGYLEIDEEGAAIVRTIFDSFEKLGSCGAVTREMSEKGIRYPSYATRSGKQRGGNLFAKQKVTGILRNPVYIGKIRWGQTVHDGNHPPIIQQEQFDRVQAQLATVVKRKVGLKAKPKGRHYLLTSVLRCVCGAHMVGYSTPGRSRIHYYYACTKQLHEGGRYSCSSPKIPAEAMEKAILHRLRNISASVEAREKIVEQALSCLSNESAKMRQEEEVLKRQQQRTRADISRLVEVLKSSGAKGLSSVQTELTKLESEDLELARRCKELAKRQKPLNQISEDARKFVQNWAEVESLLDEATEEEKTQLVRHYVEVIEIHPSDTKGEAGTYVMKLFPEVRTDWRIGWSDQYLSELICDDRRLPETTNGDAAPEDSIADLLTEPRLVCICDGKAPRAQPSS

SEQ ID NO: 6921 - protein, 574 aa, unidentified
  source 1..574: note = uncultivated organism
MEKKVIAIYARKSKATDKGETLQVQIDKCKQLALCKYSDYELEFLVYEESEGKTGANLDREKFKELMNDITTGKVINILLVYKLDRLTRSVQDFTGIYEILNAYGTEFISVKEDFDTTIPMGRAMLTLTAVFAQLEREVITERIQDSMLELAKSGRWLGGTTPMGYESKKTAYINHVGQEKKKNYLEIVHDEVDILKKIYSAYLELGSLSKVEAYLLEHKYTTRTDVDFRRYSIRFILSNPVYCRADLNAYEYFMENGYQVYSLKEEFDGKHGVMAYNKTLSLKYKDTTMDIKESRWRKKEEWIIAIGEHKPLIESDDWIKVQKMLDTNKEKSYRASRTTDALLSGILKCKCGHPMRPKTSGNRTYENEKAFYYLCEMKERSKGMRCKEANVAGNVLDKIIVNSITNLRKEIVPIYCESLSRYKNIKENNLLFNISRDNYIKNQIIKTKRYLDNINKAILKATTDEAIESFTEQYQMYLDELHQLEASIETEIIEDVEYDENVLIELLSVFDEKVWNEISYGQKKYTINELIEEIQWNGKEVEVFYKGSRMKDVDKLEQLTSITANPLEEQMSF

SEQ ID NO: 6922 - protein, 517 aa, unidentified
  source 1..517: note = uncultivated organism
MSKNVTIIPPSESRPDTLRVAAYCRVSTDLEEQASSYASQIRSYTELISQHEGWELVDIYADEAVSGTKTDKREDFNRLLADCRKGKVDRVLVKSISRFSRNTKDCLAALRELMRLGVTVQFEKENIDTGTLTTELMVSVSGSLAQQESISISQNIRQGYRRRMERGEYITNKPPYGYRNAGDGKLEIIPEEAEIIRWVFESYLNGHTPAWIAVEMNRRGIPKKYGPSAWTKKAIAYWLKNEKYTGNTLCQKTFKTGFPYTTVKNQGELDQFYIENCHPAIISREMFDRVQALLQRKKVCVSKPVEYPLSRKMICGNCGATLYRNVSRCGTATWICSRHMENTAACPITPVMERAVYTAFVWMYNKLRLHEGIILQPALGQMEALETAVQRENPAMLEINRAIAQATEQNYKISKLRSSGLLDADACAAKLAALDAQLTQLRVKRRRLLKNDDISEAVEALRQTVDSLHRGPERLDEFHEELFADLVEQIVVDSSHSLRFRQNGGFEVTEQLREDER

SEQ ID NO: 6923 - protein, 514 aa, unidentified
  source 1..514: note = uncultivated organism
MARITKIEPSKTVANKIKVAAYCRVSTDQNEQLLSLETQKAHYESWIRNHDEWEYGGLYYDEGISGTKKDTRPALMQMLSDCEHGLIDHVVTKSISRLARNTTDCLEIVRKLLDHGISVYFEKENIDTGSMDSELLLSIMGSIAESESLSISENNKWSIQRKFKNGTFKCSYPPYGYDWDKKKGEMVINPEQAEIVRYIFAQTLAGVGTHDIAKDLAAKGVPTKKGGKWTGHTVNGIIRNEKYTGDCLFQKTYTDSSFVRRRNLGEMDQYYVEDHHEAIISREDYEAANDVIDRRRQEKGIELDNGKYQNIYPLSGKVICGECGGTFKRKTYTHKVVLACTQHIDDKEKCSMKYVDLEAVEVAFATMMNRLVYGRNKVLRPFYEALQQSNQTEALLKIHDIQEQLDVLVEKKQTIKGLFAKGVIEPAVYTQSLNGVTAEVERLTTEKDALSYIASSEISHIEETRKLLAFADKGEFLDGFDGEIFETYVDRIVVKSQTELEFQMKCGLNLIERI

SEQ ID NO: 6924 - protein, 524 aa, unidentified
  source 1..524: note = uncultivated organism
MQKKKVKTKAAIYCRLSEEDRNKQFESDDSNSIQNQKAMLMQYAMEQGWDVYNIYSDDDYAGADRKRPEFNRLLSDAENKKFDVILCKTQSRFTRELELVEKYIHGLFPLWGIRFVSIVDNADTANKGNKKSRQINGLVNEWYLEDMSDNIKSVLINRRKNGFHIGAFALYGYKKDPDRKGHLIIDEEAAAVVREVFTLFSQGYGKTAIARLLNDRGIPNPTEYKRLHGLRYKQPKTKIGTLWKYSAISAMLINEIYIGNMVQGKYGSVSYKTKQNKPRPKSKWYIVEGTHEPIIDRELWDRVQKMVAERAKPFATGEIGMFAQKVRCAGCGYIMRSSKSRSKRYLQCPTKRVAKDVCDGAFISVDRLEKTVVDEINRLSDEYLDKEELEQNIEFCNNPQDRKERLISEIAACNKKMAEYAKGIRDIYMDKVKGLISESDFIDLSKNFSAEKERLERAVADGEKRLSELDEKIEIGGNRRELIEKYTNSEHLSREIVETFIDYISVGRRIPGTRNVPIEIHWNF

SEQ ID NO: 6925 - protein, 527 aa, unidentified
  source 1..527: note = uncultivated organism
MTENNRAALYLRLSKEDQDKLTRGDDSASIKNQRMLLIDFALQHDYQITEIYSDDDESGLFDTRPDFERMLTDAKLGKFDILIAKSQSRFSRNMEHIEKYLHRDFPNLGIRFIGVVDGADTYNAGNKKSRQINGLVNEWYCEDLSENIRSAFRAKMKAGQYLGSSCPYGYIKDPKDHNHLIMDEYAANVVRKIYRLYLKGYGKAKIAKILTGEGILIPTLYKRKVLGINYHNAHETETTKGWSYQTIHMILNNEVYIGNVVQNKYNNLSYKEKRHVRQPKEQWIRVVGKHEAIISSETFREVQERQRIRAKSVNGQGSPSLFSGLLFCADCGRSMVRKYERRGEHKFIGYCCRTYKDQGKSLCKSHAVDDGKLKAAVLYSVRNEARKILTSEDIARLDQIKDKYNRRKEYQDQINHIENEIRRMESYKKKTYQNFMENILSKEDYLFYTQEYTSDIFTLKEQKNTLNKQIENEGKHDREYDEWVEQFKDYINIDELTREVVLELIEKIEVNEDGSVSIFYQFSNVSL

SEQ ID NO: 6926 - protein, 576 aa, unidentified
  source 1..576: note = uncultivated organism
MSKIAVYIRVSTDEQAKEGFSLPVQREYLGDYAEREGYKLYKVYSDDGISGYSDRRPALQELLQDAKLRRFDLVIVYKIDRFSRNLKDLLNLVDELSSSGIGFKSATEPFDTTTSAGKLMFQQLGSFAEFERNRISERVFPGMVKGVQQGNWQGARFSPFGYTYNKAEKLLEIEKREADIVKLIYTMYLSGKSTQDIAVYLNKKKYQTRTGKQFYNKFICDILKNRIYTGKIVWNKKHYDKNQRTKKHYKYIKNDPSKIIIAQGKHTPIIDEQDFEEVQKLLAVKKKRWRPRAKNKEYLLAGLLTCAKCSHKYHGVSSISNHRTNNKKRWYRCSGPYVNRVRCTNRAVKAEDIEPEVTKIVAQLVENNRLKQYRWTTGTLPDVANFPDFDENTKINATLLRDKLDTNHKKQAKLTDAYLENLLGEDVYRDKMETLRGEEDGLKKFLAGYELREIESERSEGYLNRVKDFLDGYDDELTKVGFEQKRQMAGLLFKNIKIAPAIGGARPQKRISFSLFAPFNLLFSETKEKQKCQQNQRILKIRQKKSTSVPSADPWLLLYRLAKPFLFTVFQSELLP

SEQ ID NO: 6927 - protein, 569 aa, unidentified
  source 1..569: note = uncultivated organism
MNTDKKTKIAIYSRKSRFTGKGESIANQIEECKKYCIYMLHEKEENLLFQIYEDEGYSGKNFDRPAMRQLLGELQQYDYFVCYRLDRVSRSVSDFSAFVKKLEAAQVEFVSVSESFDTTKPMGRAMMNITSAFAELERDTITERIVDNMTALAKTGRWLGGLTPLGFRSKKIQYERQGKLRSYYKLVEIPEETAVVRLIYNKYLELGSLTKLSGYLMNHGIQTRNSVYYSNYSLKFILTNPVYCKATKECYDFLVENGYAVYTEKNAFSGQHGLIAYNKTNVRKRNGTQRFNDVKDWIVAIGEHPPIIESNIWIQVQQKLRTQSKFAFRKARTNQALLSGLVYCSCGSPMRPKSTGTKKETGERRFSYLCETKSHSKGGLCSQKNIQGNTLDDLVVSYLLDMYQQIETEHSAIFDAIKTELDTPSQKNTEEMFLEQSIQSNQNKLNRLVHSIENATSENVESVLFERIEELSAEIKNQKTELEQLRNGTQTSNTEKLKEYLNTLLHFDKKLWDQLDYDTKKNILALLIDHIEWDGTYATIYPSGISFLPEDESFDATDLATPAVSTMNC

SEQ ID NO: 6928 - protein, 534 aa, unidentified
  source 1..534: note = uncultivated organism
MSKIKNIAQGSYVTVIKPRDMSPAKLRVAAYCRVSSDSADQINSYIAQVDHYTRYISSHEGWELADIYADEGLTGMEVNHREEFKRMIADCRDGKIDRILVKSISRFARNQEDYILHMRELLRLGVTIYFEKENIDTGKITSEQTADIYGAFAQMETTSHSQNMRVSYRIQMEKGIFVPAKAPYGYRLVDRALHIVPEEAEIVRYIFREFLKGRGKLDIAKELNERGVERGSDRGISKADGPGAWYVDTINYILANVTYTGDQVWHKTYKTDVLPYRKEKNRGQKPKYFAEDCCPAIISKDDFEKAQQLMVRKRETYPKAPSMESMFSKRIFCAECGAPCRRKNVGAQIYWVCWRHDHGKEACPAKGRPEMRIRDALCRFYWKIRNGRETILRPVLTQLRELQERELRADQRLGEIDAEIAKLTDQNLVLTRLKSKGYLDSDLYLSQMDELNARARDLRKLRRGILEKTGEDEQIRRTEEMLDYLESCDGQIDGLDPLIFTVLIDRLRLTADGNVRIRLRNGLEVTETLNAEAR

SEQ ID NO: 6929 - protein, 552 aa, unidentified
  source 1..552: note = uncultivated organism
MIRQQQYIGGSTATKIQPTVWSAGIYCRLSVDDATTQESGSIQTQRAMLTEWCGANGVHISDVYIDDGVSGTSFDRPEFQRMIADIEIGKINMVVTKDLSRFGRNYAEAGMYLDHYFVEHDVRFVATQDNVDALKKGFDISVPMRNIINDMYAREVSQKTRAAKETRARQGLFMGSKAPYGYAKRSENKNRLVIDEGAAEVVRYIFEMAANGAGYNKIARALRAAEVPNPATYYKQRHPEYDIGGHFKEQCMWHVTSVQTILQNEVYIGNLVQCRRGTKGIKGRRIMRDASEWVVAENTHEAIVDEYTWDIVQSQLAVKRRPCKNGEMQMFAGLLYCSDCGSALSFSTLKRKTMPDGGQYKCWRYMRHGKDTCSAHYINLDQITELVLTDIRHHARFAANFRQDYLVFLRQIAELETQSDLKSLAKDCDKARKRIAALDEIIKKLLEKNATGAISDERFYTLSAEYEAEQATLKSQVAEFEQQMNTEQECEENAEEFVGLIDKYLDLQSLDARILNELIDRIVVHEKTMVDGVRHQEVEIYYKFIGLANIYV

SEQ ID NO: 6930 - protein, 522 aa, unidentified
  source 1..522: note = uncultivated organism
MMERVAIYLRKSRADVDAEARGEGETLEKHRKILADLAEEKGYNVVKIYEEIASGESVAHRPEMMKLLEKVKLGVYDAVIVVDIDRLGRGNMQEQGLILDTFKASQTKIITPRKVYDLDDEFDEEYSEFEAFLARKEFKIIKRRLHQGRIRSVKDGNYVGTRPPYGYKKVVVDGKHTLEPEPDQAKIVKLIFDWYTSDDPKKRAGTVNIAHRLNEMGIPSYFGGKWSSGVVLQILRNPVYIGKIAWGKVERKKSNEPGKGVDTRLRPVGEQILVDGNHPPIISDDLFEKAQKNRRGKSHPSYEPGKSIQNPLAGLVFCEICGGALKMFRQWGRKNRHRYLRCNNRGRGGHCNRVVRLEHVENRILSELSKWLKQYEEKLTITDEDFKEPNNDNFDTYNISIQALEEELHKLQSQKDKLHDFLERGIYDEQTFLARNERLVERIAENQKKLVQLEEEYELEKEREQARVSIIPKIKDIIDAYNQLTEAEEKNILLKEIIEKCVYLKTKQQKNAEFSLKIYTKI

SEQ ID NO: 6931 - protein, 638 aa, unidentified
  source 1..638: note = uncultivated organism
MEEIIRCACYTRKSVEDATLDRDFNSLTSQREACESYIASQKCRGWVCLPERYDDGGFSGGNMNRPAMTRLKADIEAGKIDMVVCYKIDRLSRSIIDFAELQKFFEEHNVHFVSVTQDINTSNSSGRMLLNILITFAAFERDLIIDRVKTAIDGGKKRGKFCGGVPMMGYRSDPLTKKLQIDEEEAKTVRIIFEKYLALESLKQTVHEVNRLGLTSRAWTSASTGKLHEAKKWTTASIHRVLSNPIYAGYVRHYDSIYEGEHKAIIPRSEWEKVQALMNSHGRNRRGGYRKQYHAFDGLVRCGHCRCALTPTYAKRHGKKYYYYICQKTIKDPDHTCPLSRIPEGNLEQAVLGQLAALFRAPAILRATLAAVRSKEELLRRDFERDCEILQNQLKELKKASLEKETDYEEIKKVASELAEVKRKKSLLRDVVSEETVIAALSDVSGLWDFMFPATRTELLRLIISNIEVFSDKISLTLKVEGLKNLAEEMAVSGYFHSEHTASEKLPETQQTVLSDGSICLTMKLETKKINGHRHVVIPAPGAERLKQTSLLRAIRNAQKWLAMLMNGEAKNLTDLASQLGLKPSYVSRILSLNNLAPDIVEAIVEGNEPDGLSIEKISRNIPEDWAEQRKLFGFPAL

SEQ ID NO: 6932 - protein, 537 aa, unidentified
  source 1..537: note = uncultivated organism
MSARNVIIIPEKPELVRKSSIRQEQVAAYCRVSTEEEEQQSSYENQCKYYTDMIMQNPQWSMAGIFADEGISGTSAKKRDEFMRMIKACKHGKINLILTKSISRFSRNTVDCLHYIRLLKSWGVAVIFEKENINTMQEDSEFLITLHGAFAQQEVESISANVRWGVQQSMKEGKTRIQYKKLYGYCRGADDKPEIIPEQAEVVREIYARYLAGASLRQIQKWLKGSNIANAQGTCDWTHAAIKGILTSEKYCGDVLMQKTYTTDCITHKAVKNNGERPMYLVQNNHSPIVDRATYDAVQAEMARRVALRSPSKNATTGQSCYTSKYALSDRVYCGECGTRYKRTTWAKNGKKRVVWRCVSRLDYGTKYCHNSPTVDENRLQAAILAALNSAMSEKKVLINQIAGAMEIELLPALDSAMSLADITRRLLELEQEFQTLLVKAAGDFDDESYTGSFRALAEEMADLKEKRKSVEARRAGSETDLRIRQAVEIMENSSAAITVWDESTIRQLVDWVKILSTEEILVCLHGGIEIKQRMEQ

SEQ ID NO: 6933 - protein, 544 aa, unidentified
  source 1..544: note = uncultivated organism
MNNIHFLAAMYLRLSRDDSDIGNVTDRNGIIKLESNSIGSQRELIRAYIHKQKEIELYDVYVDDGYSGSNFDRPEFKRMMRDIEAGRVNCVIVKDLSRFGRDYIEVGRYIQKIFPALSVRFIALTDYYDSYSADVGESNIVLPVKNFINDSYCRDISTKVKSQFEVKRKKGECVAPFVVYGYKKDDKDKNHLVVDKYAAENVKKIFEWKMEGMAISAIADKLNDLGILSPREYKKTQGNYRGGFSGSVTSIWSSATVKRILTNEVYIGHLIQGKTEKVNYKVKKSVERPREEWIKVENTHEGIVSPNTFYIVNNLLKTDSRVSPTIKKNSFFAGLLFCGDCKEQMIRRMNKYKDRKKIYYICSTKNRGEGCSRHSIEEENLKVLVTEVTRRYVNTFLEEKVFVGKQIEQKYDSIVYYDREMERLKQEQNKYNMLCLSLNEDLKRGIVTKDEFTRLYREFKRKSSKWQEAIKRQELMKKEMLINKNIFAERLKTIQDTVELKEIDRYMLSSLIKKIYVYEEKRIEIVFYFDDQCRDMTAANKFTN

SEQ ID NO: 6934 - protein, 516 aa, unidentified
  source 1..516: note = uncultivated organism
MNIAAIYCRLSDEDRNKANKYEDSESIQNQKKLLLEFAKENKWKVYKIYCDDDYSGLDSERPGFNRLIADAEAGKFNIVLCKSQSRFTRDMEMVEKYLHNKFIEWGIRFIGITDNADTFEKGNKKSRQINGLVNEWYCEDISENIKAVFDVKRKRGEFIGSFAPYGYRKDPLNRNKLLIDEEAALVVKRIFSWYLEGYGLQQIALMLNRKGIPNPTKYKELMGLKYKNPFKNDDYGLWNKTTLRRILRNETYIGHMIQEKRKKVSYKSKKVIAVSPDKWVKVEDTHQPIVDKSVFFAVQQRMDGRIKSTGKGKPHLFASKVKCRDCGSTMLKVTSGKYSYLRCKLYSVSSGKNMCTAHLTRLDELTELIACKIKENLIKYIDVQRLIERLEKEQKTEHIEKRYNEELKRIEREISDKEHIIKSLYVDKAKGIIDENQFIELNKEFMEDKRRLLERQKIIRKEMELNSNNKINYRERLNNLINFTELNHNMVNSMIYCIEIGEKTPEGKKIIIHWLF

SEQ ID NO: 6935 - protein, 550 aa, unidentified
  source 1..550: note = uncultivated organism
MNESLHIYLRVSTETQITDGFGLENQKDLGHKVSERMGLKPILFDEGFSSSHLDTIDHRPKLRELLLKIEDGEVDNLWVYSMDRLSRNDVVSFQIRQTLKKNKVRLYVGNSNDYNLDNPNDKLMFTIMEGFSEFDNSIRTERLRRGRLEKVRSGGWRGGPPPYGYENKDGYLKPHKDEKRWVKKIYTEYSKGSTPYQIKHLLMKNGILSRRGNVVWSEQSILKILENTHYEGYHIYTDKKLEETVRCECPKILPSNLVKDVRKRLSERKRTSNNNKFPTLLRSYLVCGHCGSKFGQLINEGQYKQHYFCRGNTERHRTEIDPSKKICVGDDGSRVRSLRIDNTDDVVWNNIVEVLSSSHLFKEIFKKETLDNSKEIEDNPIDVTFIDKKIKTHQKQISQIDDVINTQKVNSLLDDGDQSQLKDFYKKLEDKRTQILSDIENLKTQKYDDSQTKKWVHWVGQFKHKISNLQKGDLTMEERQSFLDGILQKIVVRTLDKQTHSLELVFKSPYVNDGFEWIDPKVKSKGYNLFNGKKSLKTVLGVEYNNQKKT

SEQ ID NO: 6936 - protein, 537 aa, unidentified
  source 1..537: note = uncultivated organism
MLVPKTIRCAIYTRKSTEEGLEQDYNSLHAQRDACGAYVMSQAGEGWMLLPEIYDDGGFSGGNLERPALRRLMAEIEAKRVDVVVVYKVDRLTRSLPDFSRIVDVLDRAGASFVSVTQAFNTTTSMGRLTLNVLLSFAQFEREVTGERIRDKIAASKKKGLWMGGRPVLGYDPDGRTLKINEVEAGIVRWMFQRYLELRSVNRVIDELAAQGVTSKRWMNKAGEPKGGMPIERGGAYHMLRNPIYVGDIPHKDVVYPGQHPALVDRESFDAVQQLLDETRKTRKPGKARPPHAGAPLAGLIFDSAGHTMSPVSAPRKGGATYRYYVSTAIQKGKPGAAGIHGRISAPIIEAAVLYAVAPLMPIKATGDWSAIRDLIDRIEIGRDTMLIRLDPTRCDERVVTDAGRMTLERLERLEDMPILRLPLSVTRRGALTIIGPDGASPTMRRPVDGALSAALVRAEAWKRKLMTGEEATLAAIARKEGMTDGYAARLIRIAFLAPDLKCAILDGTQKAAMSLQTLMTCDMPLAWSEQRRLYAG

SEQ ID NO: 6937 - protein, 552 aa, unidentified
  source 1..552: note = uncultivated organism
MKPATPKIQRCAIYTRVSTDQGLEQEFNSLHAQREAAQAYIKSQAHEGWKLIRDHYDDGGFSGGSMERPALQKLLADIRERRIDVVVVYKVDRLTRSLTDFAKLVELFDEHGVSFVSVTQSFNTTTSMGRLTLNVLLSFAQFEREVTGERIRDKIAASKKKGIWVGGVVPLGYEVRDKKLLVNDDEARTIRMIFERYLALGSLPALQRELRTQGIVTRRRTLSSGKVIGGVSLTNGPLGYMLRNRVYLGEIKHRDHSYPGEHQPILDPALFDQVQARLDENRRGRRLKNEHSRALLLGKLHDDRGNRMTPSYAIKKGVRYRYYVSCVLAQGRKDEAGSVSRIAASEIETIVMDALAALVPASEEPAESDRHSPATSEDRPPRITPERVEGRPEQLSDKASIERYVDRIIVGARSIEVRFVDGAEAAAQSGSITIPWQPVPFRRKRELIQPADGARPIRAEAQGRLLAAIARGRSWLEEISSDQATRLELIAAREGLPERSARSILSLAFLAPDIVKATVNGTLPRGFGVSRLIDLPANWAEQRRGLGLSARS

SEQ ID NO: 6938 - protein, 545 aa, unidentified
  source 1..545: note = uncultivated organism
MSETKTRCAIYTRKSSEEGLDQDFNSLDAQREACEAYVASQRHEGWKLLPERYDDGGISGGTLNRPALQRLLVDIDAGRIDLVVVYKVDRLTRSLPDFAKLIERLDAAGASFVSVTQSFNTSTSMGRLTLNVLLSFAQFEREVTAERIRDKLAQSKAKGLWMGGYIPLGYAPNGRTLDVVPAEAQTVRRIFKLYDELQCLRLVELAAEKEGLRTKTRDAADPKMRGGKPFSRGRIQNLLRNPLYIGKIRHKEIVHEGQHDAIIDDELFERVQSKLDAASRRAAKRKSSKAGKITSPLAGKVFDGEDHRLTPSHTSRGQRRFRYYVSHDLIRKSGNGTTDGMRLPAKRLEDAAAASLSAHLTKNLNTLVAQGGAPLSEISTRTKNLEALAIADEETRLAAIRKLNVEPGTLTITAVLPIPDVKSDTPETQITFSAPFTYRRRGVEAKIILSDQARTPDANLQKNLGRALAWLEELHSGIRMEEIAARENLSSRFIRDRLQMAFLSPKIMDAILAGTQPAHLSSNVFVRSDIPLDWTEQERLFGFAA

SEQ ID NO: 6939 - protein, 568 aa, unidentified
  source 1..568: note = uncultivated organism
MTAKPVIRCAIYTRKSSEEGLEQAFNSLDAQYEACTAYIASQRHEGWKLMPQRYDDGGLSGGTLERPALQRLLADIDAGRVTMVVVYKIDRLTRALADFAKIVESFDAAGCSFVSVTQAFNTSTSMGRLTLNVLLSFAQFEREVTAERIRDKIAASKKKGLWMGGMVPLGYDADPEPNVRGLVVNRQEAEVVTTLFELYDQLGCLRRVEDEADHRAIRSKLHVFASGKTRGAARLTRGMIHHLLTNPIYLGQIRHKDKIWPGQHAAIVPQDLWDRVQAKLQMGSARKRGASVTTDDSARSDTSSPLAGKIRDETGDRLTPSHTARHGRRLRYYVSNRLLTGKTTTDPASPDTTGWRLPAQAFEQAVANVLADHLDVAAASQSVLAEPDAATAVRIAASVTTLTARLRKDDKVTLRAILSAGQIGNGLIKITLDPAALAAAIGVLPEAMRPEVSSLTAPFALRRRGIEAKIIAGTQVPDSDPTLVRMLTKAHRWMLAVQEGTALAEIANRDGHADSYVRTRLPLAFLSPRIQAAILDGTQPQHLSVEHILRLGIPLDWSEQERIFGLNR

SEQ ID NO: 6940 - protein, 590 aa, unidentified
  source 1..590: note = uncultivated organism
MSLDHKPIVRCAIYTRKSSEEGLEQSFNSLDAQRESSEAFILSQRQEGWRVVPTRYDDGGFSGGTMERPALKRLLEDVDAQKVNVIVVYKVDRLTRSLSDFAKIVEALDARGVSFVSVTQQFNTTSSMGRLTLNILLSFAQFEREVTGERIRDKIAASKKKGMWMGGLVPLGYSLDGRKLVPNARESDLVCKIFSLYLKLGCVSKLAVQLDREKVRSKVWTTRTGARLGGVAFARGALYALLRNRLYIGEIRHRENWYPGEHKGVIPRDLWDKVQAQLNRNLRTRRKRARDQASSLLTGLVEDATGNRFTPSFTIKRGRRYRYYVSQLAIKNLADDHNSPTRVPAHELESRVTEKLLAFLKSDADVFDRLGAEDESPAISRDLVVAAKKLAARLPSLPSDDLRDLLGAFLRRVVIEENSIEVMISRKELRHVLENGGKVLATDFVGRQKPAIDVNDLIVLTIEAKRKRCGGEVHLVVPPNSASVSPRHPKFSLIKAIARAHGWYEKVVRGEAVAMRSLAQHAGLTERYVGKVFGCALLAPDIIESILEGRQPQELSFDKLCEHVPLSWPEQREHFGFPPVSSQRSKPLLQ

SEQ ID NO: 6941 - protein, 577 aa, unidentified
  source 1..577: note = uncultivated organism
MNEQKIFRCAVYTRKSSEEGLEQDFNSLEAQRDACEAYIKSQSHEGWRLVPAHFDDGGFSGGNMARPGLGQLMQSVRGGQVDVIVIYKIDRLTRSLTDFARLAETFDKHGVCFVSVTQQFNTTTSMGRLMLNVLLSFAQFEREITAERIRDKIAASKKKGMWMGGPVPIGYEVRDRKLTIAENEAAIVRSIFRLYVEEGNVPMLIERLQQEGIRTAERISRKGGRSGGRPFTRGHLYKLLSNPIYIGRIPHKSASHPGQHEGLIDVATWTAVQATLAGNTQGERTRRRRAAKPVAMLAEILFSERGNRMVPAHATKSGRRYAYYVEQVGGAHHPLSSQNDTTTEENKAIDGPSKVEPFTGANCQVALRLPEREVDTAVIGALQELMTNKEKLLAHLGDVEPDEVARALARGPELADKLASTDLVARLVTKTIVRRHSLSIWLNLRAIRSMLGTTTRQDDAEPSPPEIILDAPMSFRKRGRQLKLAIEGRHRAVRQVDVTLLTAVARACDWFERLARGSAKSIADLAAEDGFDAAYVSHLLPLAFTAPDRVEEILAGTQPVELTTDRLLWHAEVPLNW

SEQ ID NO: 6942 - protein, 526 aa, unidentified
  source 1..526: note = uncultivated organism
MKPVAPKILRCAIYTRVSTEHGLEQEFNSLDNQREAAEAYVKSQAHEGWKLLRDRYDDGGFSGGSTERPALQKLLAAIREHRIDIVVVYKVDRLTRSLTDFARLVELFDQHGMSFVSVTQSFNTTSSMGRLTLNVLLSFAQFEREVTGERIRDKIAASKKKGIWVGGVVPMGYRVEDRKLLVEEAEAATVRLIFERYLVLGSLPALQRELRQMGILTRQRAMAAGGTRGGVPLTNGPLNHMLRNRMYLGELNHRECSYPGEHAPIIDPDLFDAVQARLTGNLHERRSGRSHSDALLMGRLYDDRGNRMSPTYAVKKGLRYRYYVSTMLVQGRKSEAGSVPRVPASELEGIVMDAIGTALPAGSEAITDRERIEHSVARVVIGKGAVEIHLSEEAAATSAANPIVIPWSPQPMRRKREVIGPAGDGATARPIRAEARSKLLHAIARGRSWLGEIMTGSVPDIETIAQRDRISERSARMGLSLAFLAPDIVEAAADGTLPRGFGISRLTDLPISWAEQREKLGLPIRS

SEQ ID NO: 6943 - protein, 552 aa, unidentified
  source 1..552: note = uncultivated organism
MRTVTRLEPSVPAIRELKKVAAYCRVSRDSERLMHSLSAQVSHYSELIQKNSDWVYAGVYADEGISGTRADRRDEFGRMIEDCRAGKIDIILTKSVSRFARNTVDLLNTVRELKSLGVEVRFEREGISSLGADGELLLTILASYAQEESRSLSENVKWSRLKGYELGKPHARTAIFGYDWVGDRLVPKPGEAEAVKSIFSLYLDGKTSNQIAKWLDENGIKTIRGKTFTNTQVFYILRNITYTGNLLFQKSYTEDPITKKRKRNNGELTQFMVENTHEPLISMEDFDRVQAELDRRGKLSSCANRVDGMNCFYTKVRCGCCGQNYVRRKFRNSTEEYYSWMCRSHFKNKTEHACEGRAVRQSVLEDGFETATGIAFTEEAFAEMVEVILISGDEELTYRFKDGTEKKVYWERSNRSKPPLKRKKVEQKEQKHFFTGKVICGCCGKPMRRIQSYSVNNDAVARWKCQDSARCGTHFIYEDTLMETLSHVLWLTDFDESVYQKKVGSIEVSGRGLLRIAMKSGEAVTVRFETRQRRSKRDEESNGDPGHEEQVH

SEQ ID NO: 6944 - protein, 551 aa, unidentified
  source 1..551: note = uncultivated organism
MKRIALYIRVSTEEQAQIKEGSLKSQEQRLREYVNRRNENEKWGQIVAVFVEEGRSGKDMERPELQKMLLGIKQNLFDVVMVTEISRLSRSTRDFCNLLELFKAHSCQILSLREQFDTTTAAGEMMMHMLMNFAQFERQQTAERVKANVMARIRRGLYNGGTTPLGYAFDKDNKGRLKVIEDEAKTVKECFKTFLNEGSLASAAKSLNERGIIPRKLREGGGKYRVGLPNFTVSALHYLLTNPVYIGKRPYIENGKEIWVAAQWEAIVDENIFFKVKELLAQNKNRYKPDSYKRHPYLLSGILLCGLCNQVLIGKSSYGRNGKYFYYAHGSQIRRNHTTPNPGCHCSLGQLRALPLEKEMMERLKALIGKPQTVSNFLEKAKKEQNTKIIDQKIAEQKKKIEDNRYKIETLLSHLEKMPAESKAHSFYERLKELEGQKEKLHEELSHLETELMTQIEITTPEIYLAFLKHIASRIEESSPQMQRRLIRSVINNIVVHKNNIEASYYASKEVIERNWAVLERDSSPSAQNDIHKKNLNTVANTLTNGDPGRN

SEQ ID NO: 6945 - protein, 563 aa, unidentified
  source 1..563: note = uncultivated organism
MQEHQKRIAIYSRKSKFTGKGESISNQIDLCRDHISAHYGASALARAIVYEDEGFSGKTLERPGFQAMMQAARARELSAVVVYRLDRVSRNIGDFSHLIEELSRLDVAFVSIKEQFDTNTPMGRAMMYIASVFSQLERETIAERIRDNMHELAKTGRWLGGVTPTGYTSESVKRITVDGRQKKSCQLKLLPEEAARVRLIYDLFLESGSLSSTEAALLKLGILTKNGKPFTRFSIKAILQNPVYLIADQRAYRYFLQNKADLFSDESAFDATHGILAYHRTDQTSGKATVYLPVSDWIVCVGGHPGIIPSDRWILTQARLARSGSRTKKPRGNEALLSGVLHCACGGRMYPKLTGRRDVGGKPRYTYVCKLKERSQKALCANSNPAGNELDEVVLLALDTLPEDKELFVSCLLQAKTSCLAEKKERDAFFSALRREHEQAEKKIASLVDALAGVENPAARQRISARIEQLHRQSEAIAARMAKSNCVEAQTPAPAASPATELDLSTFSSALSQCDILQRRDIVKEVLQQAVWDGRQVSLVFPETPGQVLDADREEALFTATAR

SEQ ID NO: 6946 - protein, 648 aa, unidentified
  source 1..648: note = uncultivated organism
MARKQDISTHNKLNKCYIYTRVSTKMQVDGYSLEAQENRCRAMAEAKGYEVIRVYQDEGKSGKSIEGRDNFNRMLADIENHKDGVSLVFVFKLSRFGRNTRDVLNSFQILKDNGCELVCVEDSIDTTNAMGEVILKILAAIAEMERHNIAVQTMAGRIQKAEDGKWNGGFAPYGYKLVDGKLEIAEDEAEVIRIIFDRYVHTTMGYAGVANYLLEKGISKKVRQNGKLDTFSHYFVKNVLDNEVYKGKIHFGKKKNQVEQKEYGVYQGIHEPIVSEELWELAHKKRMETVKRLEKVYDKEHEFQLSGLVKCPLCGRGMVGNINRKRKPDGSLYKTYYSYYCNNRKARTGYRCEFHRQPGEAVVNEAVKEIVVSLVSNPKFTERMKEKVRSKVDTSEVDADINRLEQNLKSLEIRKNRLMSEIDNLEINEIYEERARDLNERLNDFYNRIAETKKYIQQKKEEKVKIEQDKITGDTIYKNLMAFVRVLDKTTDGDKKRLYNMLIKEIQIFEEKQEDGRWIKSITFNFPVYYKGNMVEDISWVTEDTNESVVLLSQQKADDYLEVEIDLDELDATSAETKATYEEIKKYVAEHNDGMKVSNLYIAQVKKKCGIELGQNFNLPKSENAKQPQCPKEKEDAIVEALKAFQMI

SEQ ID NO: 6947 - protein, 514 aa, unidentified
  source 1..514: note = uncultivated organism
MNPNVTVINPTITEDKESKIRVAAYCRVSTNSEDQQNSLMTQMRYYENFLADSETERLVSVYADEGITGTRTDKREEFQRMLKDCRRGKIDRIIVKSISRFARNTKDCLSVLRELKELGISVMFEKENIDTANITDEIMVTIMGGLAQEESSSISKNVRWSIRSKMKNGTVKFHSAPLGYDLYEGNLIINKREAEIVKSIYKMFLSGMGYDSICRELNESKVIKNDKGTKWLSASVRYILTNEKYIGDSLWQKNYNTSMPYKKVKNKGELEKYYINNTHEAIITKEEFEKVQELIEQRKHSNKNLINNYPLSKKVYCGKCDSLFKRRYINEHYYNAENCQMKQIPEQAFYRAFTVMYNKLKANYSVIFTPMLTQLQELKNKKYGGNKQYIEINKKIAQLKEQTHVLARLKTKGFLDENKYIEQITEINAKIEKLNREVRKIVRCDDEDEMIEQIKEIASIIENGTDLMMGFDDVMFESLVDKIVVKNREEFEFNLVGSLKFTERISNVLCNQKT

SEQ ID NO: 6948 - protein, 526 aa, unidentified
  source 1..526: note = uncultivated organism
MAKRNASLVPDKASNGSGEGKTIRCAIYTRKSTEEGLQQEFNSLDAQREASEAFIASQKQEGWQVITDRFDDGGYTGGNMDRPALKRLLAAVEARSVDCIVVYKVDRLSRSLLDFARIIEILDRNGVSFVAVTQQFNTTSSLGRLTLNILLSFAQFEREIISERTRDKMSAARKKGKWVGGHPVLGYDIDPKGGRIIVNPAEAEQVKAIFGLYMAKGSTLPVLQETQRVGLVSKLWTTEEGKVRGGKPFTRGSLHATLTNVLYTGMVDHKGVLYTGEHDRIIDQDTWDRVHEILRRNGSDKGATVRNKLGALLRGLLFCVPCGTPMMHTYTMRKSKRYRYYVCYNAQQQGWQKCETKSVSAQAIETAVLDSIRRIGTDANLAEAVAAEALDQTARQRAAIDKELDTQRGSLRRLNQSLAREAADTTVDSGARFDRIVALQREIETTERRLTALAAERKSNEHDRINANDLRTTLAEFEAIWSSLIAREQEQLIQLLVAKVGYDGRTGKVTVNFRSAGAKELCQGKS

SEQ ID NO: 6949 - protein, 507 aa, unidentified
  source 1..507: note = uncultivated organism
MESIIKNCAIYTRKSTDEGLDTDFNTLDAQRESCEAYIASQRSEGWKAIHTHYNDGGFSGGNMERPGLQKLLSNIKEGKVQIVVVYKIDRLTRSLMDFSKLVDVFDEYGVTFVSVTQSFNTTTSMGRLTLNVLLSFAQFEREVSAERIRDKIAASKKKGMWMGGNVPLGYDVEARKLIINKEDTKTLRFIFESYLELGCVSKLKAMLDDKQIYTKVRFSKRGKKTGGKPYSRGALYALLKNPIYIGKIRHQDEIYDGLHEAIIEQEMWDDVQAHLQGQAPKKRGYKKAQDLNILKGLLFDSEGHGYTPTYTSKAGKRYRYYINQNLVSHPSTVIARLPAHDIEEVVKESVKNNIVQALCLDPIGHHGIIETIEESSFGHYMPEVINRIIVDEKELSIELNCLALKDKIEVTLGFKMPLTSMMAVHHFNVPFHTRRSHKGAVVIKPEGKDYDPLDLSPAELKNLVCGIIWRDRHFAGDSMRQIARDENMSEAGVRKIIMRSFDTLMAL

SEQ ID NO: 6950 - protein, 525 aa, unidentified
  source 1..525: note = uncultivated organism
MKITDITVEKKANNKQRLAAYCRVSSDSEDQLHSFAAQVCYYTNYEKQHPDIELVGVYADEGLSGTSMKNRNELQRLIQDCEHGKIDRVITKSVSRFARNTHDLLQTVRLLKSLGVTVLFEEQGIDTAKLNSEMFLTFPGMIAQQESESISGNMRWSYKKRMESGEFNTCSPAYGFDLVDGKLVVNQSEAAVIRRIFDMYLQGIGKERIADILNEEGVPKKRDTKRWNQRMISYILINERYMGDALLQKFYTTDTLPYKKRPNKGEKTKYYVEDAGPAIVSKEVFEAAKALSQKRACLTEHHANHTLTQMCFCQKCGRAFRRLTVRGKQYWISSITEQSDCDCKKNRLSEQGVFTAFTLMMYKLKDNRKNLIGNLIYQLEKMEAMNGNSESISVIDEEIAQLCVQKHVITKLHNSGILTATDYAGQASSIENQISELRAQRRKTLSENPDDEMLDELKSLYRCLDECELSAEIDKVLFEQVIKRITVIDNSTIRFRLLGDIEFEETINEKARCKSREDKSNTLRI

SEQ ID NO: 6951 - protein, 549 aa, unidentified
  source 1..549: note = uncultivated organism
MTNPERRTIRCAIYTRKSSDEGLDQAFNSLDAQREACESYIASQRHEGWKLIPTHYDDGGLSGGTLERPALQQLLEDIAGGTVDLVVVYKIDRLTRSLADFARLVDRFDAAECSFVSVTQSFNTSTSMGRLTLNVLLSFAQFEREVTAERIRDKIAASKKKGYWMGGLLPLGYDKHPDPKMRTLVINEAEAETVKEIFQLYEKHGCLRQVEQEVVRRGYRSKKRAFADGRTTGSQPLRRGQINFILRNPVYLGRIRHKTETYEGLHNAIIDQEAWDAVQSKLDQKSPKKSRSPSKSGALLTGRIFDETGDFLTPTHSQKGNRRYRYYVSGRLLAGSQPDPSGWRLPAKQLEDVVGRTVLQHIEGSTSRLLARPSAAQMENLRTRLAALSANAAFDFVERVQVNPGELNIKLSAEAMSDCLNIPDAGLDSTQLELTARFRIRRRCGETKLVFGASSSAPDLKLIRMVALAHSWLDEVKSGTCIKDIAERYGWPSLMVRERIRLAFLSPGIVQAILEGRQPDGLTLTQLVKSDIPLDWDQQWTEFGFGDTD

SEQ ID NO: 6952 - protein, 547 aa, unidentified
  source 1..547: note = uncultivated organism
MQRILDNNYLAAIYLRLSKEDGDLSTVGGKTESNSIANQRKLIEEFLKEHPEITFVQEFCDDGFTGTNFDRPDFQKMMEKIKQREINCIIVKDLSRFGRDYIESGRYLEKIFPHLGVRFIAINDNYDSAQKEQAGNEIILPFKNLINDSYARDISIKVRSNLDIKRRNGEFVGTHVVYGYQRSEEDKHRLKIDKTAAAVVQRIFQMKVDGRSPGQIAKQLNEEGVPSPLEYKRLCGAKLKTCFKQQAKSKWSHVAVYRILQDEMYIGTLVQGKSTSPNYKVKTRKLKDKEEWMRTENAHEAIIPPGTFDLVQKLLQEDTRSTKEGDTVALFSGKIFCAECHNTMARKRSVISGREYVYYVCQDSKCKLRIKEQLVYDAVLAVIQSQVAMALDMERALKQLDDVSWERRELERISSSIVRQEEVIAHNNQMKAMIYEDFKNEIILIEDYRIFKAEFDKNISEAKETIARLVGNRNKVKNGLTGQQSWLSQFHQYKNIQALTRRVIVYFIERVEITAEKEVVVTLSHSDQFKAIAEFLGDYHIASKEVG

SEQ ID NO: 6953 - protein, 503 aa, unidentified
  source 1..503: note = uncultivated organism
MAEITIIPAKNQPSEIVRTAAYARVSSDSEDQLNSFAAQIRYYTELLKNSTDAVLVDMYADEGITGTSAAKRPDFQRLMSDCRKGKIDRILTKSVSRFARNTTECLAAVRELKALGISVYFEKEDIETAEISTEMLLTLYSQFAQEESISISKNVRMGIRKRMQDGTYVPSSTPFGYVKGENGLEIDAAKAEVVQAVFADFLHGASEATISDRYGIGIATVKYILRNEKYTGDSMFHKWYTTDTLPFKCMQNNGEREMYLAQGTHQAIISKDDFQKAQELLDQKGRQHRGKSTVSYPFRKKIYCGVCGTLFKRKERENRTCWVCRNHDQSAKLCPVKQIDETEFELAFIALFNNLKLHCAEIISPMYRQLQRLADLGESANTQVAEIRREIADQKEQSYLLAQLNSQGVIEPVYFSARSRELDRNLVRLQNQLHSMLDGEDDERLENLRKLIAVLEKAEPLTEFDEDKFGSIVEKITVLSESEIRFELVGGVGFNEQIQRKGR

SEQ ID NO: 6954 - protein, 641 aa, unidentified
  source 1..641: note = uncultivated organism
MTEVYSDQQNTHERAESIAGIVAVDGNDHKTGQTNLKRLRCAIYTRKSSEEGLEQDFNSLDAQREACEAYIASQASLGWKAITKHYDDGGISGGTMNRPALQELLVDIRNGLVDVVVVYKIDRLTRSLTDFSKMMEVFDNPRGDGSRRCEGEPQSLISFVSVTQQFNTTTSMGRLTLNVLLSFAQFEREVTGERIRDKIAASKKKGMWMGGKVPLGYKTEDRKLIIYPEEAETVRYLFSRYLELGSVTKLVEDAKCNGLSGRVVHQKNGLVKATRPFGRGNLYHLLSNPIYIGKVAHKGQTYDGQHEAIIDQDLWDKVQAKLKQNAVNRKLGVNSKSQNLLTGLLYDQSGKRLTPSHANKKGVRYGYYVSKRLMADESEPQLGDVSDSNDSGKSGSITSKSISRSPTNWRLPAKELDQTVLSIVVDHLSDESKLQSLLPLQETTIEHHQRRTRQAKKLISTLQTAKPIEQRKLLSKLLKRVELHKDKITIEVRCKALAKELGESYSAISSEPRPTRYKTHAIEVPYQLKKRGVEAKLVIGKSELREPNPDHQLIMLIAKAHNFMDKLSNSTTPSIKELSEQEPQSASQIARMLRLAFLAPDIIESILAGTQPPELTAEKLRRLPELPILWNEQRQLLEFPG

SEQ ID NO: 6955 - protein, 566 aa, unidentified
  source 1..566: note = uncultivated organism
MARGSIQKRVSTTTGVTVPLVPHHRGEDPMTKPTPTSLVAMRYAVYTRVSTSKQEETGTSLGSQLDACRDHAAARGGSVDPAHVYTDTASGAAWRERPALQSLLAAVRAGEVDVVLAYALDRLSRDQQHVAVIVDLIEEHGARVELVTEDFEQSAVGRFLRGAKAFVAEVEREKITERTVRGKLTRVRSGKVHNHGNDLYGYRRDKVRGVRDVHEPEAAVVRRIFAWAAAGDSLRGVVSRLNGEAVPSPAASKGTRYGRPTFWGQGAVRRILTEPAYKGEPSAWRWRRLKGGKVELRPKSEWIALPGDTTPAIVTSETFDVVSRRLAANKGADTRNAARPYLLRGLIVCEVCGRKMRTSPERGRRTYRCSSRETPAGACGGKRVDADIVEAWAWAETRRTLEDRSVIEAEIAARHDSGPDPALVAERASLARLIERAEGQQERLMHLLRDDVAMPVDLFRREIAAAEEEKRRLRGELATVDRQLAEDDDALASLQDVVDYCDAVVGHLDDADFDLKRLALEAVDAAVRADGRSFTLQCFLPGRTVGTATQTSGRCAPLPPRPQVPA

SEQ ID NO: 6956 - protein, 556 aa, unidentified
  source 1..556: note = uncultivated organism
MDSTIQKIYKAAIYLRLSREDGDVAEGSKEISNSIANQKELVMDYLKSHPEITICDIYTDDGYSGVNFDRPGFQKMIKDIRDGKANCIIVKDLSRFGRNYIESGRYIEKIFPMLGVRFIAITDNYDSETSEDGYGTNMIIPFKNLINDAYARDISVKVRTNLQIKRKNGDYIGNFVVYGYLKDPDNKNKLIVDEYAGEIVKDIYAMKVCGMSQQAIADKLNKNGILCPYEYKKSLGIRINDNFKKKTRAVWSYNAVLRILKNEIYTGTLIQGRCTTPNYKVKKKVVKSENEWVRVENNHEPIITKEQFDIVQELLIRDTRVLPETNAIGLLGGVVYCADCGRAMVRKTVPAHGKKYIYYVCSSNKKDKNICSSHRISMDKLTDIVCENTIKQVNLVMDYAKELEVIEQAAYMKADVRKYDKLISKKKEEIQKYQTRKLNLYDDYKDGILDKQEYMMFKSDYDKKLENCENEVASYEADKDMILDNKSEAQKWIGQFRKMGKITELTRNAVAVLIDKVFVYSSDRIEIDYKFDSSFETMKKYVDAYSPNTFQEMEAI

SEQ ID NO: 6957 - protein, 566 aa, unidentified
  source 1..566: note = uncultivated organism
MKAPTLKALCCAIYTRKSTEHNLDLAFNSLDAQREACEAYVKSQAHEGWRLVSEHYDDGGLSGASLDRPALQLLLDQVRSGKVDVIVVYKVDRLTRSLADFAKLVETFDKHEVSFVSVTQSFNTTSSMGRLTLNVLLSFAQFEREVIGERVRDKIAASKRKGLWVGGPVPLGYRSVDKKIGVVEEDAEIVRTIFRRYLALGSIGLLIDDLHRRGVMPKPRIGNDGKTVQPTHFMVGPLAYLLKNRFYVGEVVYRDEVHPGEQLPIVDRALFEAVQAKLKDGKVTRKFRRSQSPAFLMGLLYDDRGNRMSPSHANKKGVRYRYYVSQAILQNRKAEAGAIARVAAPEIEELVVAALRHHVDQTDQVEQIEQIDPIVGEVNLGRTKSSTPMEIPDRDLVALHVERIVLRARHIELALRPEASDAGPSGAAGPAREGPGDADQSPPSPTVLQIPWAPTSASARKGIAWKPSAQPNLDPATVEALLMAIAKARSWMSDLAEGRANSFEDIARREDKVERHIRNLAPLAFVSPRVIEAIANGAAPADLTVTTLAHKLPHRWAEQEMMFGAA

SEQ ID NO: 6958 - protein, 513 aa, unidentified
  source 1..513: note = uncultivated organism
MATVTIIQPNTATIINKVRVAAYCRVSSSSDDQLNSYQAQLTYYSHKFENSDTEELIDLYADEGITGTREDKRDEFQRLIKDCRRGKIDRIYTKSISRFARNTRDCLKNIRELKSLGITILFEKEDIDTANVSNEMMITIMGGLAQEESVSISQNMQWSIQKRMQNGTYVVSNQPFGYQKENGRFIVYEEEAAIVRRIYTEYLQGYGLLTICEHLNQDGIIMGKSGNIWRKKAVRYILTNEKYIGDCLWRKQYTENMFPFRKSKNKGQAEQYYISDNHEPIISREDFEIVQSLLAEKGEKYGNRKIHQYPLTLKVKCGICGSTFKRKKANGIIKWVCQKHDFNLVECPCRGIQQDAFYDAFIHICNKLIVHHKIILQPLQTSLQQLKLKKYSGNLQVMDIHRDIAKLREQVHVLSRLKTKGFLSEAKFQEQVSKLNGKINRLQQELKRMVKINEEDEMLTHIEELLEIFEKRNQLISLFEPDLFGSIVDKIVVKSINELEFHLIGGLKLSEII

SEQ ID NO: 6959 - protein, 536 aa, unidentified
  source 1..536: note = uncultivated organism
MENNRVCCLYRVSTDKQVDYDNNHEADIPMQRKACHRFAEKMGWSIVYEEQEDGVSGHKIRAENRDKIQAIKELARKGMFDILLVFMFDRIGRIADETPFVVEWFVKNGIQVWSTQEGEQRFDNHIDKLLNYIRFWQADGESEKTSIRTRTSLGQMVEEGHYKGGVAPLGYELVKKGRVNKKKHELYDLQIKEDEAAIVRLIFDKYTKEGLGVQKIANYLNDNDYPNPTGNMWAYNTIRHILHNTTYTGILRSGESRSPFLPELQIVPQEQFDRAQEMCRQRAEIISNMPRVPLNMKGNALLSGNVFCGHCGARLHLSSASKYYQEDDGTRTKKYRIRYTCYGKTRKVTQCDGQTTYAQHKLDEIVEEIIKEIFDRIKGIPKGAIINSRYKKELQMRKNNLKQRQKDYAKEIDKLGKLREEVVKSIQGDSAFSQQMLAGLVEDSEARVKILKEECANAEQELEYAQSIIKVLTEQYDEIVSWSELYDNATIEAKKMIVNSMIKRIDVFRGYELNIELNMNIQQFFNGIEDELISEA

SEQ ID NO: 6960 - protein, 509 aa, unidentified
  source 1..509: note = uncultivated organism
MANGNNSNGTPKPVRCAIYTRKSTDEGLNQDFNSLDAQRDAGEAYIRSQAGEGWTLLPDQYDDGGYTGANMDRPALRRLLADIQAKKVDCVVVYKVDRLSRSIRDFGKIMEILEKHGATFVSVTQQFNTTTSLGRLTLNILLSFAQFEREIISERTRDKQILARKRGKWTGGHLPLGYNLEDGNLVINEEEASRVRQIFEWYLEGHSVHGIVAKCEDLGWRNKQWATKKGKSFGGHPMRKCHIYTMLANPLYAARIRAADEIVAATHPRIVDDNTFDLVQQKLKENTRNPGGEHRPKLEALLRGLLYCSCCGSAMSPSYSSSRNRRYRYYVCLRTMQRNGGGCTTRAVSAPVIEDAVIESVRRFAMTPEVIEATARVARQRLAEELGRHREELKAINVRVRNAKSQLVRAKNLDAAREAALREIVSAGEAKAEQLRSLVERGERLRFDDQMVRQRMATFDEVWKTMTIQQQAALLRQLIERVSYDARGEKVKVTYNSNGIREFCKGAIK

SEQ ID NO: 6961 - protein, 504 aa, unidentified
  source 1..504: note = uncultivated organism
MIRKADFAKETAPVRCAIYTRKSTDEGLDQAFNSLDAQREAGEAFVLSRKQEGWVCLPERYDDGGYSGGNIERPGLKRLMADAEAGLIDAVVCYKVDRLSRSLLDFSRLIEVFDRRHVMFVSVTQPINTADSSGRLMLNVLLSFAQFEREMIADRTRDKMGAARRKGKWTGGFPVLGYDVHPDGGRLVVNEEEAETVRQIFTLYLDLRSLQATAAELNRRGWRTKSWATKEGTFHEGVAFNKAHVSRLLGNVLYVGKVSHHGQVYDGEHPAIVDEATYERVQTALAGNNVSGGAKAKNRYGHLLRGLLHCTACGCAMSPSVTRRNGKAHRYYVCGNATRRGWSSCPHPSLPAGEIEDAVVDRIKCVGRDPGLVAETLAQVRAIQKTRVPALTAERRRLDRELLRLKDRGDAGNQIGVIEARLVEVGEELAVLQSASIDKRDLARALSMFDEVWACLFPREQERVIGLLVERIDFDAGRETVAITFKPTGIRALAEEIEAQEVTA

SEQ ID NO: 6962 - protein, 526 aa, unidentified
  source 1..526: note = uncultivated organism
MRDGNGKRAPAETTTKVVRCAIYTRKSTDEGLNQDFNSLDAQREAAEAFIQSQRHEGWQLLPDRYDDGGFSGGDMERPALKRLLTGIEARKVDCVVVYKVDRLSRSLLHFARIMESFDRHGVSFVSVTQQFNTTTSLGRLTLNILLSFAQFEREIISERTRDKMCAARRKGKWVGGHPVLGYDIDSRGGKLVVNPDEARQVRKIFDLYLEHEALLPVLQELERRKWRMKRWTTKNGLTPGGKPFTKGALHALLTNVIYSGKLDHKGTIYAGEHEAIITPAVWEQAQKILRRNGRTNGAPTRNRYGALLRGLLYCVPCGAAMIHSYTMRKSKRYRYYVCYQAQQRGWKNCPSKSVSAPAIEAAVLESIRRLGADPALATETARQARAQLDRRVEQVEVEQAAAQKQLRQLNAELVELAGDGTMQSSERLDRMVAVQKDIHAAEQRLSELAEEFQELRNDAFDEQDLVQALERFDPVWNSLTTREQARLVHLLIEKVGYDGRTGKVTVSFRSAGLKELCNGKGDTNTQ

SEQ ID NO: 6963 - protein, 507 aa, unidentified
  source 1..507: note = uncultivated organism
MIKIAIYCRKSVEKENSISVENQLEFCKTHFLRLYDDCEFFEFKDDGYTGANTNRPAFTRMMTLARAKQFDVIASYKLDRIARSTVDYLNIFEELKSLDISLISVSEGYDPSTPEGQLMMKMLSSFAELERQNIAKRVKDSMEERAKIGCFSGGTCPTGYEVTVVDFNGKKLKYLKLIPKMKNRVKEIFNLAAEGYSIGQIHNKLNLPNKTLYNIIQNPTYVETSEESKSYLESLGYKVFGELKENHGFLPYNRRPKKNGKKVTSSKEKFVAVSIHEPIVTSDVFIKANENIKARGQEAKPRISQKTFLAHLVKCQCGSGMFVHANSSNTSYKDKVYFRCTAQKQKKDCNSKWVKVKDVEDAFLLTLKQIKLDKSLLEEYCTKDSLDEINFKALITEKKKEISKLNKQVDTLVENMSLLSGPAVKNIADKINNLSADINILNGELTHLQHKEILMESEKLDIDTLYNQILYLLDHHDQISLEDMQILAKSIVTRIEYDGVDKITLIF

SEQ ID NO: 6964 - protein, 538 aa, unidentified
  source 1..538: note = uncultivated organism
MKIFIYSRKSVYTGKGESIENQIEMCKEYILTKLSQAGEEEITIYEDEGFSAKNTERPQFQQMLRDIKRMKPDYIVCYRLDRISRNVSDFSALIEDLNNNNISFICIKEEFDTSKPMGKAMMYIASVFAQLERETIAERVRDNMLMLARTGRWLGGTTPFGFTSEKMQEIVIDGKIKTACRLKDNPEELKVVDCIFEKFLELRSVSGVSKYLIRQGILSRTGKMFSLLGIKEILRNPVYCTADEEAWDYFTKNHADICFDKSECSDQYALLAYNKRDYRKKNAPRQEMEKWIVAIGRHKGHISGKKWVAIQNILKNNVPTGKKPAIMHNDYSLLSGLIYCEKCQSRMFAKQRSNNHRLYDYICNNKLRGGVDLCDCQNINGQQADNLVCEYLVPYTNENSGIYRLLEKLKRDLQVQTPKSPAIVIEDNIKKCNREIENLINILSHANLGSAIIERINVRITELNKELSSLKEEQVHQQKDVNIIADKESQVEMLSMALSSFKDNFNMLSIEEQRTLLKLIVEKIVWNGNDLHIFIDDE

SEQ ID NO: 6965 - protein, 534 aa, unidentified
  source 1..534: note = uncultivated organism
MEKKKVAIGYIRVSTEEQAKDGYSLDNQESVINKKCAYEGWELNRIFHDKGISGASMDKREGIKDLLKYIKSNKVDYLVVYKVSRLSRKIADVVAIADHLEKVGVKLIAIEDNIDTSTPMGKYFLVLGAIFAEMERENIITQVKGGMEQKARLGEWNGGKPPLGYDLDKKKLKVNEEEAEIVKIIFNEYLKGNGYKAIASFLNEKGFKTKLSKLFNGNGVKEILKNPIYCGQIRWGYRKDWGKLHEGNKRKRQYSETPIIREGIHEAIIEKEIFDKVQNILKSNPRYHMKQFNGNHLLSGLIRCPDCGYGMSMQNVKSKGKVYEYYTCNQYQTYKSCKPNSIKKSDIEEEFLTIFEVVINEPSTLTTILESLNNTGHQGKQIGLDIKRKEDEIKKLRSKESKLMDELLEGNDNYKTTIRRKIQEISDEIVVLENDNLKLQTAIHKNAESKLDINEIRNLLQKAGKVIPLLDKPFQQSLIRKLITSIKVKDKRIVEVHFSFQKGLKVDYTKGEEVPTDDQSFRVRSDTVNRIISK

SEQ ID NO: 6966 - protein, 519 aa, unidentified
  source 1..519: note = uncultivated organism
MKPKRQCAIYTRTSTEEGLGQEFNSLHAQAEACAAFIKSQASEGWIAARRVYEDGGYSGGSMERPALQELLDDISAGRVDVVVVYKVDRLTRSLADFAKIVEIMDSEGASFVSVTQSFNTTTSMGRLTLNVLLSFAQFEREVTGERIRDKFAASKAKGIFMGGTPPLGYDVGERALIVNAAEAETVRFIFRRFLEIGAVSPLAIDLRDRGIKSKLHTSRKGNTRGGVFIHPGALAQILDNPVYRGIIRHKGVHHAGQHEQIIDQELWDAAQELRSKTRGKGRTPGLRSGARLIGKVFDSLGNPMSPNSTTKKKVRYRYYMTREHGLEGPKGAIHRVPMTTLEEAVIGEVAPQLAASWKPNITDRTQCAIDSVLRVRIFPTELLIDVAAEALGADPETEPTTLKCGVAFERPRNSTTLIRSGAPVPAKVDRSLTRAVVMARCWAKRLDAGEHGSIKALARAEGLCHLYTAKLMPLAYLAPDLVAQILEGRQPRTLTLTALISEPLPLDWAAQRARFAAFA

SEQ ID NO: 6967 - protein, 519 aa, unidentified
  source 1..519: note = uncultivated organism
MKNGNGTAINGTGNEKTPNGVTPKVRCAIYTRKSTEEGLDQEFNSLDAQREAAESYIASQRHEGWVTLPNRYDDGGYSGGTIERPALQRLLQDIENRRVDTVVVYKVDRLSRSLLDFTRIVETFERQGVTFVSVTQQFNTTTSMGRLTLNILLSFAQFEREIIGERIRDKVAAAKRKGKYTGGMPVLGYDVDRVVKKLVVNPTEAQLVRHIFKRFAQTQSATLLATELNNQGHRTKSWTTVKGNVRLGLPWHKMHLYRLFNNRLYIGEIVHHDQHYPGEHEAIVPRDLFDEVQTILEENCRVRGNKARARTPALLKGLIKCGYCGGAMGPTFTKKDGKTYRYYVCIHATKRGWDSCPVKSVAAGEIEGVVMAQLRSLFQTPELIAETCRVARQKEADEIERLKAERFALAGELPTVGDPLRKREAEKRITEIDGIVAALETNLLSEQQVADALRNLDLAWNELFPSEQARIVSLLIERITVANEGIDVRYRHDGLHSLVADLKDIEEEPIDEREAHDPS

SEQ ID NO: 6968 - protein, 560 aa, unidentified
  source 1..560: note = uncultivated organism
MMQHFIDQTYYAAIYLRLSKEDGDFSQGEKKESNSIANQRNLIEDYLKRHPEIIRVQEFCDDGFTGANFDRPDFQKMIEQVKKKKINCIVVKDLSRFGRDYIESGKYIEKIFPALGIRFIAINDNYDSAMNQQAGNEIILPFKNLINDSYSRDISIKVRSNLDIKRRNGEFVGNHVVYGYQRSEENRNQLVIDKTAALVVQSIFRLKIDGFSPAQIAEKLNQDGIPSPYEYKRLSGSWYQSGFRKNVQTLWSAVAIYRILKNEMYTGTLVQGKTSTPNHKIKTRSRKDQSEWIRSENAHEAIISPATFDMVQKLMLEDSRSPSRKEAVHLFSGKIFCSDCQSSMVRKKSKAYGREYVYFICSSNKQDKEVCSPHRIAEHTVYDAVLAVIQSQVALALDLEKALRELDGVSWERRELERIQRGIARQEEVIEYNKRMKAMIYEDFKTEVITLDEYKIFKADCDQKISDANQSITRLIGNRNKVNSGLTGQQNWLSQFREYQNIQELNRHVVIHFIERIEVTAEKQVQITLNHADQFRAILDFLKEYQKQHQTELLVSEEVG

SEQ ID NO: 6969 - protein, 509 aa, unidentified
  source 1..509: note = uncultivated organism
MAIVLYARKSVERENSISCETQLEYCKMMIRPDERDEKVITFVDNGFSGGNVDRDGFQKMMRLVKQGRVKKVIVYKLDRISRSLSDFVNILQEFKAYKVEFVSSQESFDTSSPYGEMIVKLLMVFAEFERTSIIERVTQAYAHRSEMGFYMGGRQPYGFELVPAVIHNIKTKKLEPIPSEVEQIRYIFEVYAQESISLRRLLEILVAEGKQPLNGSSWTTAKLSTLLKNPIYVKADSDVYDYYDRHGVQMVTDVSLFTGECGAQLYGHTKHDPDAPDWSDMRLVLLTHPGIVDSNIWLKCQRKLEKNRQVGNSVSNPTSWLAGKVVCEKCGHTMTTIKGKINKAGEMRRYFNCTGKSHKKICTGPRVTIYAEDLENMVYECISAKLADLKETRHTTQKEDSAEINDLKLKIKAIEKSERQLLDTMLAGGFNDDLLALANQKATQLKRDRLILQERIDDLKSIGDETDTVVNLAKSWRTADYNRKKTVAMIMIHKIIISEDGSTKVLWNI

SEQ ID NO: 6970 - protein, 508 aa, unidentified
  source 1..508: note = uncultivated organism
MIAIYARQSVERENSISCETQIEYGRSAVRPDERSQKIQTFVDNGFSGGNTNRDGFQKMMKMVRQGRISKVIVYKLDRISRSLADFVNILQEFKEHNVEFVSSQESFDTSSPYGEMIVKILMVFAEFERTSIINRVTQAYAHRSEMGFYMGGRRPYGFELVPAVIHGIDTKKLQPISSEIEQICYIYEVYAGESVSLRRLLDILAVENKKPLNGSRWTTAKISALLKNPIYVKADSDVYDYFERHGVRIVTEPAQFTGTYGAQLYGRTKHKPDNPDWSDMKLVLMSHRGAVNSDIWLKCQRKLEKNRQITNSYSNPTSWLAGKVVCEKCGHSMTTIKGKVNKSGEMRRYFNCTGKSHKRVCTGTKVTVYAEDLEDMLYDCISEKLADFKEVTRSTNSTNTAEINELKLKIKEIEKSEALLMDAMLSGGFNSDMIAIANQKAVRFKNDKLALYERIDYLKVKDGGTDIVINLSKSWKNADYSCKKEVAAILIDKINISEDGSTKIIWNI

SEQ ID NO: 6971 - protein, 541 aa, unidentified
  source 1..541: note = uncultivated organism
MTMPESKKIWRCAIYTRKSTEHNLNLEFNSLDAQREACAAYIKSQAHEGWRLVPKHYDDGAFSGASLDRPALQKLLNAIQAGRIDIVVVYKVDRLTRSLTDFSKLVELFDKHSVSFVSVTQSFNTTSSMGRLTLNVLLSFAQFEREVIGERVRDKIAASKRKGIWVGGPVPLGYTSINKKVVVVPEEAETVCMIFRRYLELGSIGALVQDLDRKGIKTKRQEISNGRVRGGIRFGIGSLGHLLRNRFYIGEVVYRGGVHRGEHEPIVDAALFEKVQAKLTHGRAERRLRFRASPAILTGCLFDDRGNRMSPTHTNKREIRYRYYVSQAILQRRPNEAGSVARIPAADMEVLVIEALRKRNDEESEENKVPFPKSVVAESDLIRRYVDRIVVRPQAIEIHLRNTHPANKGRGAKHSRISSIISVPWSATASRAEKGILHSSCSNQSLRPESRDALLMAIARARTWIHDLAEGRTASFSDIAKRERKVERHVRFLAPLAFVSPRVVSAIFDGSAPADLTVTDLAKALPASWAEQEQRLQLPQT

SEQ ID NO: 6972 - protein, 547 aa, unidentified
  source 1..547: note = uncultivated organism
MDTTSPTITVAPYVRTSSIKQIDNNSIPAQLAEIEKYCKLNDYEMLPPYIDNGISGAKMENRPGLQQMLNDLKNNKLDKIVVWKLTRLGRSMKDILQIIEECEKNNVSFYSVSEHLGIDTDMNKLMLNIMGSLGEYERTILKDNIRIGASNKASEGKSVGGQPPYGYDRIDGLLIVNQHESRIVKEIYQMYSQGMNFTAIAKVLNDRHEVTKLGKPHSKDPVSYILKNKVYRGLVVYNQYVDWKKKGRKGYNDNPIITEGEHEAIISQELWNRVQTQLKARKRHKRGNNKTDNLLTGLLKCKCCNANYVISNTINTLKDGSKRHFRYYVCRTRKQRSKDCKAAPNIRADFIENYIFQNIKNLIQKPELIKKVVEAVNHKRTPNTDEINHEIANKQFQIDDLKSRYNNLIQVITTDTSLTESIKPTLLKYSEQINELNTSIKQLESNKNVNHPKIEADTVINIFHILFKNLENTKNSSLKAVYHLVIEHIYIKADSNNKKQFYITFKFNQDIVETLLNNINPDEQLLNCSSSLLANIPSEIIFLSFEI

SEQ ID NO: 6973 - protein, 557 aa, unidentified
  source 1..557: note = uncultivated organism
MHNVGKYAVYSRKSKFTGKGESIENQAEMCRDSLKSRYGITDDDIVVFEDEGFTGGNTNRPKFREMMERCRRGEFRMVICYRLDRISRNTSDFVRTYEELRAHGVSFRSVSDDLDDTSPMGKAMMMISSVFAQLERDIIAERIKDNMLALARSGRWLGGNPPTGYRSVETVGSVTADGRVRKAHRLEQIPEEIAKVKLIYSKFLECRSLTAVETYLMQNGVKSKAGNDYSRYAIRTILQNTVYAIADEDSRRYAEENGMQVFGGEESFDGIHGIMAYNKTVQRAGRAMKQKPCSEWVVAGGKHEGIISGSKWVEVQRILGANRKKSYRRQRSNTALLSGILFCAECGSIMRPKLSSRVNKEGERVYDYLCELKEKSRGIKCSIRRINGSELDRLICEEIKKLSEDKEELIRQLKAARKGFSDTFDEHRSEKESLTKKKKQYDTECANLLGVLASAGETAAADRIIARINELHERSAEAEKQVEEHRRLMEKDEMTDEGHRDLADMLASFPKVFDSLDVIKKRDVIRSLVQRIEWDGEFAHVYLAGADIPKPQRECSK

SEQ ID NO: 6974 - protein, 534 aa, unidentified
  source 1..534: note = uncultivated organism
MAEKRMTDGSMALQEKQYRVITIEATEKPQKAELRVAAYARVSSASDDQLNSFAAQNRHYSDLISSRDNWRMVDIYADEGITGTSAEKRQDFQRLLADCRRGLIDKVLVKSISRFARNTKECLEAIRELKSLGIGVYFEKEAIGTGTMSGEMMTTLFASFAQAESESISGNMRWSYQRRMQSGTYLPSSVPYGYRICNRQIVIDEEEAKVVRRIFRDYLAGINMAEIAASLNRKGIPKRKNNAEIIWHKASIRYILSNERYVGDSLWQKTYMTDAFPPVMVRNRGEKEMYYAQTTHPAIIVREEFDAVQMLLGKRAKRESCHKNKSPFAQKIFCGQCGTSFRKKVSHGKVFWSCRKHNEDIQSCPVTQVLDAEIREAFLRLYYNLKTHGEVLLSEMLTSLQTICNRRMLWSLDVIELNKQISELTSQNQMLATLKQQGLIDPDIFISQSNELTEQLRTVKLKKERLLVADGDSTIAQTRELMEILDAGPDFLDCVDAELFGELVEKVIVDSNVQLRFRLKNGLELVEAIERTVR

SEQ ID NO: 6975 - protein, 598 aa, unidentified
  source 1..598: note = uncultivated organism
MVWSCKVLSYESERRLHSGRGCSEPKELVQSSRAAIDYMQQRMSGTKIYHEEECMAKRRSPFRNGLDFGDSGNPVRCAIYSRVSTQRQADEGVSLDMQRERMIQYAQDHHWQVVEQYEDAGFSGANPKRPALVRLLKDAEEEKFSVVLQYKVDRLGRDVPSYQVALAKLESWGVDVISITQEFDMRTSGGRFNRNIMVAAAGFERDQTIERTIDALASLRDKGELFSGVAPFGFKHENGTLHYVEDILPIAKDIFRRATTGVSQREIARSLGLSRDKVRSIVTNPLFAGYVAYRKRDENDSRVPFDKWLYKPFAGAEPIMDFENWKELQRELHMRSERSSGKTLPLFGKRLRCEDCDHLLSAHGNAKGGQTKYACQSSGSNQQACGTQVWEQYLLPAVLPRLSSELKGFTPKYDGEERIQQIDVRIAKTDKDIERLQGRLAIPDAPVGAIVDKIAQLRQERHDVLQERAAADEGRARLQEVQDVLKDFSGFYTRLDREGQHEAMQRFIKCIDLGKSHLVIHWQFSQNLCELPRSEASPKARKRDVRGRVVEIGAIDNLGGQLDAAYGLLLNLLPNLPAAAERQPSKQRKARRGKRASV

SEQ ID NO: 6976 - protein, 550 aa, unidentified
  source 1..550: note = uncultivated organism
MTSKRQIRCAIYTRKSSEEGLEQDFNSLDAQREACEAYVASQKSEGWVALREHFDDGGFSGGTLERPALQRLLKEIETGKVDVVVVYKIDRLSRSLMDFAKLVEVFERRSVTFVSVTQSFNTTTSMGRLTLNVLLSFAQFEREVTGERIRDKFAASKKKGMWMGGCPPLGYDIDSRKLVVNAAEAKTVNLIFRRYLDLGCVRTLRDDLAERRIISKVWTSTSGRAHGGTPFDRGALYCLLKNRAYVGETTHKGKSYPGEHKGIVARELFNAVQEQLASSRRRTPGKASVPQEAPLAGLIFDDRGTAMVPTYSMKPDGRRYCYYASRQSGERSSRAIARVPATAIEDLLAAALTRLDLATAEQAKSGDLRSLIQRIELGTDHVSLQLDRAEAFRRWRAGEAAGFKERDIIAYGRAKLGTDELLTEEKEHLILALPVRARFRGGRAQVLSAPGTGPSARMPDAPLIKALAKAHRWRAMLEVGEVGSVEALAGKLKQERKHVGAILNLAFLAPDLTKAILNGEQPQGLRLAHLLAADIPLSWAEQRAMFRQVS

SEQ ID NO: 6977 - protein, 659 aa, unidentified
  source 1..659: note = uncultivated organism
MRTHDRSRTAHRLPRRPQCGGDDRGQRGRDGARLDDGEQHGGEGHGGQRSLQMPTPPSPSRGRRRCVIVGVGLGPYGRHGTDDALGSEAHIAFPYHHRPQTLQSISGAAECRPRVGAAAHPGGSKRAPLELMPIRIATYARVSTADQADTGTSLADQERRLKAAVVARDATLVHHFVDAGVSGAADSRPGLDSLRRAAHEGSVDMVMATKIDRVSRSAVGLLALIEDLRKHGCHLVLIDEGLDTSTSAGDLTSGLLGVIGGWERKRIAERTKAGRRAAAELEGRFVGSTPPFGYRSVPPPGGKGKRLVVDQGQAETIKTMFQLVVVENRPITEAAELMNRAGLTAPTGGEWTQVSLGRWALREGPVRTASGVWRFDNIDVSVPPILKPAEAALWAYWQDSRRRRENRQRGPYLLSGMVHMPCGRYAMGRTAGKQRPTYCCRQHYLPAGDPGRHPECLNISCASLDGAIVHHVRDVLSHPQTLRDTAMAGLGLADKDASSDELLGQLRSLDRQVAEEAKLFRSQGYSGSPLLAVLAPLQQERERLTRQIALTQQAREGARTFGTGIGALADLIRESLDSAGPQVWRRLLIALEVTVRIDGYDRCQQCTGSGYLAVAASGGGRRWPKNCRTCLRGSVPQLTVELDDVAALALTEKLGARGV

SEQ ID NO: 6978 - protein, 521 aa, unidentified
  source 1..521: note = uncultivated organism
MSKRPDTKAIPRIRCAIYTRKSTEEGLEQEFNSLDAQRESGEAYIASQKTEGWVCLPEKYDDGGFTGGNMDRPALKRLMADIEAGKVDCIVVYKVDRLSRSLIDFARLMEVFERKKISFVSVTQQFNTTQSMGRLTLNILLSFAQFEREIISERTRDKIAAARRKGKWSGGRSILGYDVDPTTKKLVVNPADAEQVRRVFRMYLDRGSLLDVARELNREGSRTKAVQTKKGAAYGGREWDKPAVLKVLTNVLYVGRVRYKTETHPGEHAAIVDEATWSGVQERLRHNGRSGGMLVRNKHGALLKGLVHCGPCGVTMGHTYSTKSGTRIYRYYVCYKAQKQGWDSCPCRSLPAEQIEGFVVEQIKRIGQDPALLSTTLAKCREQAEAQRESINGELAIVERDLASVHADLARVAADAASSPHAAARLADLHEKVRVREDNATTLRGQIRALDSDEIAKADVDAALADFDGVWSRLSPKEQARLIRMLIQRVDYDATKGSISITFHPVGLRTLGQRAIEGVRA

SEQ ID NO: 6979 - protein, 531 aa, unidentified
  source 1..531: note = uncultivated organism
MTQKNKTVRCAIYTRKSSEEGLEQDFNSLDAQRVAGEAYIQSQIHEGWQILPERYDDGGYSGGNMKRPALETLIADIEAGKVDTVVVYKVDRLSRSLHDFAKLVELFDKHDVTFVSVTQAFNTTNSMGRLTLNILLSFAQFEREVTGERIRDKFTASKKKGLWMGGPVPLGYDVVDRKLVVNQAQVEQVKYIYQKYLELKSIEKVLHHITLKGYTNKKGNAYTKHSLRTILTSVLYIGKMSHKGEIFDGEQAAILDESLWEAVQARLKQNTLNEAGKKNEVHEHLLKGKVFDEEGNVYVTTYSSKKGRRHYYYLNKMTRDRINAKALHETILFALENDSTLIKSIDLAGLTKEEVHHRYKQNLESIAKQSVDKIVVHDKKFSIFADRVKVEAIIQGKSIDKPAEPNLHEMSIDMLFKSYEGRKCILLNGHQVSHKDVDVKRHENMVRLIVQAFQLNEKFEKSAIKTIKEFAEQVNMDRTYLGDLLKLKFLAPEIITMIFKGQSPMHLNASKLMRTKFPRCWKQQKEAFGLI

SEQ ID NO: 6980 - protein, 525 aa, unidentified
  source 1..525: note = uncultivated organism
MARNNARRSASNGSNGPAENRVVRCAIYTRKSTEEGLQQDFNSLDAQREAAEAFIASQKGEGWQVVAEHFDDGGYTGANMDRPALKRLLAAVESRSVDCVVVYKVDRLSRSLMDFARIIEVFDQNGASFVSVTQQFNTTTSLGRLTLNILLSFAQFEREIISERTRDKMSAARRKGKWIGGHPVLGYDIDPNGGRLIVNSEEADQVRILFDLYLELGSLLPVLHEAERRGLRTKLWTTQDGKVRGGQRIAKGTLHGILTNVIYTGMVDHKGNQYPGEHERIVEQETWDRVHETLHRGTGGDGARLRNKFGALLRGLLFCVPCGSPMMHTYTMRKSKRYRYYVCYNAQQRGWKNCESKSVPAQAIESAVLGSIRRIGTDPKLAEAVAAEALDQVARRQREVDQETEAKRRNLRQLNQQLAREAVDISVDSGARFERIATLQREIETVGRRLEELAREGEDLARDQMSAEDLRGTLAEFDAVWSTLNTKEQEQMIRLLIAKVGYDGRTGKVTVNFSNQGAREICQGK

SEQ ID NO: 6981 - protein, 578 aa, unidentified
  source 1..578: note = uncultivated organism
MGTRKTTSQLKDATAIEGGVSESSGKRAALYLRRSAVHERGDTTSIDYQREACERIAAQHGLEVVAEFNEGQGRSASHFKENSRPEYDRALEELGSSYTVLIAYAVDRLTRRGMQAVGFLLDKASSGGGRIITTDGLDTANESSRMVASFMSEMARSEMVKLSQRISAAKEQHRREGRYLGGVVPYGLMAVRSLSEPTYLVVDPVAAAVIVEMVDKILAGATLAETCLLANAAGHRRSSGAYWVPGTLIRVVRSPHLIGHRRQGSTVFTDESGQPVVLTAPIISEAKFARVDRLLSNRRTAPQDPSKPTKFRVKARPSLLGGLIRCGECGEPMVAERYESKGEQYGYYVCRQGVHKRLSVSRAPLEDFVSRTALGFVARLDPASAITATAPGPVGPPRGTTPRRGPYPEPSGQSYDFRNLPMNRWSALNSSVASSVASSVASLVQACSGAGGESSSNGTDPSLMLMPNYRTRRGPRRGKAPEGGLTRRLKPPSQPSPLQANQAQSSPDKPRQAQTRLALPGHAKPGHQVAGSRHSLRRVQRQRRSGSDHAKHPAHAHGTARLVGPRLLRVCGVGRHRP

SEQ ID NO: 6982 - protein, 543 aa, unidentified
  source 1..543: note = uncultivated organism
MARALRNGRAVAAVASAPVRCAIYTRKSTDEGLDRDFNSLDNQRERAEDYIRSQRHEGWEVLQERYDDGGFSGGNLERPALKRLLAEIEAGRVQRIIVYKIDRLSRSLLDFARLAEFFEQHGASIVSVTQQLDTSTSMGRLTLNMLLSFAQFEREMVSDRTKDKMRAARRHGKWTGGMVPLGYDVAPEGRKLLINKAEAEQVRAIFNLFLEKQSLVGTSQELNRRGLRRKSWTTRKGVAREGVEWDRVTLRRVLTDSIYAGMTKLGGEVFRGEHDGIVPKGIFERVQAALEANGRDGNSTVRNRSGAILRGLLRCAACDSAMTPTYTKKEGRLYRYYTCSKAMKRGHDTCPTKSVPAAEVEQFVVNHIRAIGNDPNLCRETFRKALAQIAAQRREWKAETKRVAWEIGKAREEVDRLVGAVSEASNGAREALLVALEKAQQRLTTLENRTQEIRSQLETVKAYEVDEGEVARTLAAFDPIWEVLHMPEKERILQLLIERVAYHGRTEEMVITFRPTGMATLAGELGAEGEIRYCPSGAGSQTR

SEQ ID NO: 6983 - protein, 506 aa, unidentified
  source 1..506: note = uncultivated organism
MVAIYARQSIDKKDSISIDTQIELCKRQLPDGTPCVVYPDKGYSGSNINRPEFQRLLDDVKTGKIDRIITYRLDRISRSVLDFANLVDLFNKHSVSFNSTQEQFDTGTPIGRAMLTIVMTFAQLERETIQIRIRDNYYARGEKGMYLGGPAPFGFRKIETQTEQGKLKMLEPNPDTVETLDRIFKMYGEDMMSLCGIAKQFNREAVWAPKGNHWDSSKVSRILRNPAAAQSSAELYHYYRNLGIRFTNDIADFAFGKGCYLYGKRKPNQRKFHDVSGHTLSLAPHDGVIPSDLFLRCQERLDGNQQIDNRKRSQITWLTGLIKCGKCEHAAIPKSSNFGRYHNIYCSGKVSYNCCDVEGNLGRLETVENAVRDRIFLWAGRYSALRSEHAAVNTQERNRLNCRMEELDDSIHRLIDMAAESGEITSRYLDEKVSQLERERCGLEEELNQLQEGRQEAITKEVQDIEATWDNLDLVGKNRIAELLISRILLFHGHMDIEWKYRFDLG

SEQ ID NO: 6984 - protein, 557 aa, unidentified
  source 1..557: note = uncultivated organism
MSSKMVRCAIYTRKSTEEGLEQDFNSLDAQREACFAYITSHKPEGWIGVRDRFDDGGYSGGTLERPALKRLLESIENGSVDVVVVYKIDRLSRSLMDFAKLVEVFDRKSVTFVSVTQSFNTTTSMGRLTLNVLLSFAQFEREVTGERIRDKVAASKKRGIWMGGNPPLGYDVRDRKLIVNAIEAETVQLIFKRYLDLGCVRLLADDLAKRGIVSKRRVLGGGKEIGGRPIGRSALFLLLNNRTYLGETIHKDASYKGEHETIVPSELFEAVQRKLAENHQPVSVRTRVWQKTLLSGLVFDDAGTAMLPTYTLKQGSLRYCYYVSRPRLKGDASDASITRISAPKFEGFVLDVLDRLQLKAIEVRSIVRRIDVMPHSVRILLDKTETVALWRVKSPDRHDKEILGDARRYLLAGETMSPSSDHLILTLPVRAKFPGGRAHQSRNADRAPPSPDLPLIKAVARAHRWHEMLLSGEVETIGAIARRFGMERGHAGRILNLAFLSPRITHAILQGEQPQALRLSHLLRADIPLSWEHQDGLLARLAESARQPLLQPYPSGA

SEQ ID NO: 6985 - protein, 589 aa, unidentified
  source 1..589: note = uncultivated organism
MYHGDPWVIYSRKSKFTGKGESIENQIEMCKQYIRVQYGDEVADNALVYEDEGFSGGTLERPQFKKMMMDAKTRHFKAIVVYRLDRISRNIGDFAKLIEQLNGMKIDFISIKEQFDTSSPMGRAMMYISSVFSQLERETIAERIRDNMHELSKTGRWLGGTTPTGYASESISHVTIDGKTRKACKLKIIPDEIGLVKMIFDKFMETNSLTKTETYLLQNGYKTKMGKDFTRFAIRGMLTNPVYMIADEAAYEFLTQNQVDLFSDRSEFDGVHGIMAYNRTNQQPGKATQIKPMEEWIVSVGKHEGVIAGADWVKIQWSLEQNKSKSYRAPRSNVALLSGLLICGNCGSFMRPKLTGRHNTKGEMIYTYMCSMKERSRRHICNIKTCNGNILDADVIKQVKMLSETNSDLVRQIEESKRILMGNRESYDEQIAKLETQIAENEDEIRGLVSALGRASGTSAENYIMNQIDELHDKGEGLKRHLAELKELTASHALADVEFDLLTQMLASFKDRVDDMSVEEKRAALRVFVKEVIWDGENVHLVLFGSDYKYEFPEMPVGIGNKLAQSDEEENFDGVAERWNVEPLCEGSK

SEQ ID NO: 6986 - protein, 511 aa, unidentified
  source 1..511: note = uncultivated organism
MPQVQVIPPIGEQAKKLRVAAYARVSSDSEEQLNSFAIQMAYYTALIAEKEDWEFAGLYADEGVTGTFIAKREDFQRLLADCRAGKIDRILVKSISRFARNTTDCIQTVRELRTLGVSVYFEKEDIDTGAMGSEMLLSILGSAAQEESLSISQNLKWSYRRRMRAGEFITCRAPLGYYLKGNTLEPDPQEVPIVHYIFRSYLAGKGTVEIAEELNRLDSSPRQRWSTSAILYILRNEKYIGDSLVQKKFTPDTFPLRQQFNRGQVSQYYIHNSHPAILSTAAFEAVQNLLRQKHKTHAPKKPIESYPLSHIVSCGTCGSPFYRRPYPTGTKWLCSSHLKNHCSCSQTAVFQEEIFQSFLTLFNKLQNNREFLLRPTAAQLRELRERAVCSQPGVAELQNKIAELVKQDHALTRLQSKGAVDPALFRERHNRIARQLEETREKLRPLQQPDEVSTALEETERLLTLLESGPPLLEFDSAIFQQVVANIVVFPEKFAFHLKCGLALEEGRALS

SEQ ID NO: 6987 - protein, 567 aa, unidentified
  source 1..567: note = uncultivated organism
MKTKKIALYTRVSTGYQVDKDSLPFQQQELKSYCKYVLHADMSLIDVYEDAGRSAKNTKRPGFERMMEEVKNDKISHVIVYKIDRISRNLVDFSLMYDEFKFHRVTFISLNEQFDTSSAIGEAILKIILVFAELERKLTSERVKDIMINRAQAGQWNGARVPFGWEWDEKNACPIHSETEGPLVVDMYNMYLEVKSTLKIRDYNNSHNIPTKRGGEWTSKTIGDLLRNPMNRGDYRYNYRESARGRKKPSEEVIYLENVFPPLVDAETWDKVNRIMDYNRDVRNTSGMHTNRKLCNVFAGLIVCGKCGANYQVDRKDYQRKNGFRPSLYHCTAKSKKTACSALNVSEVQIGPFMINYISGMVRLVEMRKKITNTNDIETILLSGSVFADIAGIDTDGLNNTYMLLKGQNSRNNTLWDIDTAKQDINTSDESNELRKKIEKFKRAQERLEDAYFFDDTAMNEKEYLEKKAKFESGRIAAENELKSLTSQNTEQHYNNPAFLKTAAAFLLAHKIRSGEHIVYSELAPAVGDETLKKFFNSVLDHIVVKDKKIVEIVFANGLSHKILYRD

SEQ ID NO: 6988 - protein, 505 aa, unidentified
  source 1..505: note = uncultivated organism
MHTMINQEGNRVRVATLSRVSTEKDTQEMSIENQELLFNEYCARNGYEIVKQYVEKGSGVKMKRKVIEDIKEDMKEKKFDMLLVKDLSRLARNVQIALEIINLANEQEIKLLTPSDTVNAQLGSSLSSPMITFLCMIYQMESENTSARIKSTILLNQRQGKVHGSTPPYGYSTHRGQFEIRNDGTVEIVRRIFLIYLSGTGIDTIAKQFNNEGVSTPSQVLNKRNQSLLWGGSTVKGILTNRAYVGDLIQGKSETLNVTSNRRKTRKSEDYVIFEQHHEAIIDREQFKMVQELMASKKKISSKPQTHLFTNILFCEGCGRGLWYRSTNAGGRYVCGGRSKYGIKGCPAPSSIKEQELLNILSEEFHGFIEEIESKDYWRQLQQSLEGKRNGTAARVAELNEKIEVCKKRIENITMDYYDGKVQEDIYQRIITQTNETVDRLEYDLEELKSIDEEIEGFKSYDELKQELLKFTLDKELYAGNMILRFIERFVVNSEKDVVVSYRFR

SEQ ID NO: 6989 - protein, 515 aa, unidentified
  source 1..515: note = uncultivated organism
MSKAPSTVRCAIYTRKSTDEGLEKDFNTLDAQREAAEAYVASQKNDGWECLPDRYDDGGYSGGNIERPAFRRLMTDIEAGKVDCIVVYKIDRLSRSLMDFSGIMETLERCGVSLVSVTQQFNTTTSMGRLTLNILLSFAQFEREIISERTRDKMTAARRKGKWTGGMPVLGYDVDPKGGRLLVNEAEAKQVRGIFKTYLREGTLQRALKVVRQRGWKTKRFKTRKCIWRGGREIDKTTLHNILCNVLYLGKIRCKGEVVDGEHPAIIDEDTFQRVQRTLHANRASGGIHVRNKCGALLKGLVRCKHCGCGMTHHFTTKGNRRYRYYVCITAQKQGWSRCPAPSLPAGELEDFVVDQIRALGKDRPLLKETLQAAQEHLQDEVVLLKEQRDAASEHMRSIGREIGELGTRVGIDEEATRQLGRLQEVLREKEREIQQIDDKIAGLHARMVEPDELAGAVEAFDPVWESLSPTEKAKLVHLLVDRVEYDAEDESISISYHSTGIHSLIEENTLCRTT

SEQ ID NO: 6990 - protein, 553 aa, unidentified
  source 1..553: note = uncultivated organism
MERAALLRIAGNTPMTKALRRCALYTRKSTEEGLEQAFNSLDAQREACAAYVVSQTGEGWRTIATAYDDGGFSGGSMERPALQRLLTDIAAGKIDVVVVYKIDRLTRSLADFARMVELFDRHNVSFVSVTQAFNTTTSMGRLTLNVLLSFAQFEREVTSERIRDKIAASKAKGMWMGGTLPLGYDAPAQDRALIVNEAEAATVRLIFGTYLELGSVHALERWLDTHAIRSKSRLTRKGKMVGGKRFSRGALFHLLRNRTYLGMIAHKGKVYPGMHPAIVNADQFEAVQQMLDSNVRRFTSTRQTAGALLTGRIFDCDGESMSPTFAKGARGKRYRYYVSASLQQGRRPAGESNVIRRVAAVALETQLTNIVHRTTGSAQTDPLTLILRLEVHPRSLQILLPAHYLPEVQSRIGDDEHAAVDPADPSRLRLVVPVRVQLRGGRTWIIASKTSPARPDRVLIKALRAAHTLVRHGAQGFPFLDAVPASPYERRLLRLAFLAPDLQKAILAGRQPPGLTLSQLMANPIPLSWHAQAALLRGEELSGEGMYACTANP

SEQ ID NO: 6991 - protein, 532 aa, unidentified
  source 1..532: note = uncultivated organism
MISNGKNGNGKAPAGPVRCAIYTRKSTTEGLDSDFNTLDAQREAAEYYIRAQAHQNWTILPARYDDGGFTGANIDRPALQRLLDGLDRGALDMVVVYKVDRLSRSLLDFARLMERFDKKNVGFVSVTQNFDTSSSMGRLVLNILLSFAQFERELISERTRDKIQAARRRGKWTGGQLVLGYRTDPEQGGLAVVPEEAEIVRTIFDLYLSTHSIGFVAGRLNELGIITKRHVSKKGKTRGGRRWNKSTVYQVLRNPIYVGKTRTGDGQLHAGEHEPLISLEAFEKVAESMSLRSTGRIRTNRKSEYILTGLLHCGPCDAAMTSSQGTSRNGKKYRYYRCVHQQQHGGRCPTGHLPAMDIEEAVVAEVKDVATRGEVRQKILDRFFSDTGALSAAEATRVQLRARIEEGNAESKRLLSAFSDAGASGGKTLATRLGEIESDVDHLGIQLGEVEDRLRALTGAQRQVERVARLLDGFGTMWSALVPQEQRELLHLLIDRIVVDLDAGGFRITFHELRVAPTQATTAPTRAEEATS

SEQ ID NO: 6992 - protein, 541 aa, unidentified
  source 1..541: note = uncultivated organism
MLDRNGNGNGRKAGGNGETKPSVRCAIYTRKSTDENLDNDFNSLDAQREAAENFIRSQTLEGWIALPDRYDDGAYSGATLERPALKRLMVDVEQGKIDAIVVYKLDRLSRSLLDFAKLIETLERQKVTLVSVTQSINTKDSSGRLLLNILLSYAQFEREVITERIRDKVAASKRRGKWLGGVPPLGYNIDRANKRLVVNPDEAVMVRYIFRRFLVLRSAVGILKELKEKGWRMKSWTTVKGRKHQGQPWNKNQIYRLLNNPLYIGLVKHKDQTYPGEHEAIIEKKLWDEVQAILGEDGKMRGNHGRAKTPALLSGLIRCGHCGTAMGITFSQKNNRTYRYYLCVKAAKQGYHDCPVKTLPAAEIEEAVIDQLRAVFRSPELVAATARNVQGLEEAEIKRFAQEKEIAEQQLQVLRAAANRLLQSGAGSNQSIAFIQGELSKLDADTQAAERQLRMVEAELAFYRDKPSGVAEVLHELTVLDDLWDELFPPEQERIIRLLVEQVLVYADRIEVTLRGEGLQTINSEMLPDPADERETAHAEP

SEQ ID NO: 6993 - protein, 569 aa, unidentified
  source 1..569: note = uncultivated organism
MKRQFYAAMYLRLSRDDEDRDGTIKSESDSIGSQRELIKSFIREHSDIELYDIYVDDGFSGSNFNRPDFKRMISDIEAGRVNCVIVKDLSRFGRDYIEAGRYIQKTFPALSVRFIAITDHYDSMSADTGESSIVLPVKNFINDSYCRDISTKVKSQFEVKRKNGEYVAPFAVYGYQKDKNNKNKLVIDDYAADVVRKIFAWRMEGLANSAIADRLNELGILSPKEYKKSKGEKYKGGYKSQAKAMWRSSSVKRILTAEVYLGHLVQGKTQKINYKVNKMVEKPESEWIRVENTHEPIISEDEFSVVQRLLQTDGRTSPQMEETNMFAGILYCGDCDEQMVRRVNKYKGKETVYFICSTKNRGEGCSRHSIKETELKEMVDTVLRNFANSFLEENELFQKVKEAETNFEAIVHYDKEIARLKEEQNKYYSLCSGLYDDLRKEVITKDEFERLHSEFKRKGQELEEALSRQEKLIKDMFKRGVLSAGRLKTFQDSVELKEIDRKTMRSLVQKIKVFENKRIEIEFYFKDEYLILKNMNLRFSLLENEQMDVDSVQKMLPFAREQVWERSVS

SEQ ID NO: 6994 - protein, 539 aa, unidentified
  source 1..539: note = uncultivated organism
MKAPLVKSVRCAIYTRVSTEHGLDQEFNSLDAQYEAASAYIKSQAHAGWTLIRSRYDDGGYSGGSTERPDLQRLLNDIRARKIDVIVVYKVDRLTRSLADFAKLVELFDAHGVSFVSVTQQFNTKTSMGRLTLNVLLSFAQFEREVTSERIRDKIAASKRKGLWVGGNLPLGYEIKDGKIAIVEEEAELVRFIFRRYLELGAVNELVRDLSDRNIRTKIRQLSTGATRGGIPFGRGALYYLLSNRFYIGEVEYKDEILPGEQPPIMDRALFEAVRQKSLAQWSHRTVVRNKSDHLLAGLLFDDAGHRMIPTHATKAGIRYCYYASTPVLHGEAKTEAAGSVSRVPAADIEETVLKSLEAYFAAQQDGSTSKALRLRDRETLAGLVTGIVVHSDKLVVRLKSDSNDDELDRADDASLTIPWQKPPSKKSRRILLPNGASRDDARPEQFERRARLVSAIAKGRQWLDDVVSGRVTTVQEICIREMCSVRQVNMTISLALLAPNLVKAAIEGRLPRGIGVERLRDPPTAWSQQFEALGLNSE

SEQ ID NO: 6995 - protein, 522 aa, unidentified
  source 1..522: note = uncultivated organism
MKHTVPKRQRCAIYTRKSTEHNLDLAFNSLDAQREAGEAYIKSQAHEGWTLLRDRFDDGGLSGASLDRPALQDLLDRVRARLIDVIVVYKVDRLTRSLADFAKLVELFDEHEVSFVSVTQSFNTTSSMGRLTLNVLLSFAQFEREVIGERVRDKIAASKRKGLWVGGPVALGYRSVNKKLEVMPEEADLVRKIFADYLTVGSIGGLAAKLNDEGQKPKPRRLADGRTVQAGCYRIGPLAHLLKNRFYIGEIVYRGAVHIGEHEPLLDRHLFEAVQARLQAQAVARKLARHQSPHLLTGRLFDDRGHSMSPTHANKRGVRYRYYTSQALLQGRKAEAGAVPRISAADVEKLVVEALRSNMDIEPSATDRDLIERHLDKAIVHNDHIAITPLPLHGADAASLSPYAIEVAFAPAALFRQGVSHVPTNGASLTETDRATLLKAIAKSKAWIDTILKNPGIDFGAIAHRENLAVRHVRFLAPLAYLSPRIVEAIAEGRALGNLNVSTLVRALPLSWTDQEKRLGLG

SEQ ID NO: 6996 - protein, 528 aa, unidentified
  source 1..528: note = uncultivated organism
MLQAQRTVTRITPNATAVQEPPELRTAAYCRVSTDSSDQEHSFAAQVKYYTEMLEKLPDSTLVDIYADEGISGRGTAKRDDFNRLIADCKKGKIDRIITKSVSRFARNTVDCLQTVRMLSKLGVTVCFEKEHIDTAYMTSEVILALSGTQAQDESVSHGNNMKWSYTNAMKSGNFLGTVATYGYTLINRSTVIINEEEAKVVRMIKDMYLSGMGLQKIAKHLNAHGIMRRSGKPWNGLAIKYVLTNERYVGDALLQKGITTFEYPPRKIRNDGSQPQYYVENCLPAIFTREERSAILELMKQRGIKGRKVGGHPLSKLLRCSECGHSYRRVVTSNDILWRCAYRSSGETDCTIYTVREEDVYEAFITAINKLRAGRDTILIPMIERLEAMQSKANGTTVKISTIDKEIAVLSRQSLVIAELLNQGILDTADFAAQNNELTQRIFDLRVKRRQLLAVNETDDALNALRELADMLEDMETEMTDYDEDIVRAIIKNATVVSDTELKIHLHGGLTVTEYLPQYYSRRCKHQ

SEQ ID NO: 6997 - protein, 554 aa, unidentified
  source 1..554: note = uncultivated organism
MAKKTIRCAIYTRKSHEEGLEQDFNSLDAQWEACKAYVESQKHEGWKLLSERYDDGGISGGHLERPGLQSPLADIDAGRIDMVVVYKIDRLTRSLADFARLVERFDKIDCSFVSVTQAFNTSTSMGRLTLNVLLSFAQFEREVTAERIRDKLAASAKRGLWMGGLAPLGYDPHADPNKRELVLNKVEAVRVERIFQLYDQHQCLGEVSRLAEREGIRSKTRCFASGTQLGDKVMSRGAIHSILTNPVYRGMVRHKESAYPANHSAIIDEDLWSRVQESLKEKSARQRGQRSKKTGNGSPLTGKLFDENGDRLTPTYANSKGRRWRYYVSRSLMAQKSEGSDGWRLPAAKLEKAVAEAFNNWATSAPDKLLRNPSANSHSKVSAALGQHEPPSSSTWKHCFGFIDRIEVRAGELELKMDAKALLEIIGIDDSELSVEALVHTEEFVMKRRGVETVLILGAAKPGRDPTLINAIAKAHVWMKAWREGSSLSDIAKSIGWTPSPLRQRLKLAFLSPAIIKAILDGRQPADLSLERILRSDLPLDWDRQAKTFGFELP

SEQ ID NO: 6998 - protein, 558 aa, unidentified
  source 1..558: note = uncultivated organism
MSKPSIRCAIYTRKSSEEGLDQEFNSLDAQYEACASYIASQRHEGWKPVKDRYDDGGISGGTLERPALNRLMADIDAGRIRMIVVYKIDRLTRSLADFARLVERLEAAGCSFVSITQAFNTSSSMGRLTLNVLLSFAQFEREVTAERIRDKIAASKKKGLWMGGVCPLGYDRDPDPDTRTLVVNHREASKVNKLFELYDQHGCLKSVEQEAQSLNLRSKRHVYTTGRVAGDKPFSRGQIYHILRNPVYLGLIRHKDQTYPGQHPAILEEVLWERVQEKLISAGRRSRGRTSSGDPAAKVTDQAVLTGRMFDETGDRLTPTHTTRRGRKLRYYVSNRLISGGIDPSGWRLPAPKLEEQVATVVADHIETHASNYTLTVSPDIRSEKSVKEKAGSLIKRLRTDGLSSSPDLVDRIDLRPDRLLVRLNAENIVRELGVEVRNLSGELAALEVPWQFRRRGVEAKIIVGNPAPEPDQTLIRMLSLAHQWLEQVKAGLPLKQIARKQGGTPAYIRTRTKLAFLSPKIQQAIVAGNFPPAFTTNRILQAKIPLDWREQDTLFGV

SEQ ID NO: 6999 - protein, 530 aa, unidentified
  source 1..530: note = uncultivated organism
MVEKIFRCAVYTRKSTEDGLEKEFNSLDAQYEACAAYALSQKHEGWHLLPERYDDGGYSGGNMERPGLKRLLSDVADGRVDNILVYKIDRLTRSLSDFAKIVDVLDTAKASFVSITQSFNTTTSMGRLTLNMLLSFAQFEREVTGERIRDKIAASKRKGMWMGGPVPLGYDLENRRLIPNPKEATLVRYILEQYLKHPSVQDLGNHLNAQGYTTKVQHRASGPHRGGCRFRRGTLYHLLSNQIYLGKIVHKGQVYDGEHEAIVSQDLFEAVQVKLKENASGSSRRLKAQHPSLLTGLLFDSEQRPMTPAHTTKGKTTRYRYYITRADKADTAPIWRVNAHDIEQLTTDCIAAYFNSPAEIAKLAGSDVEATTLQNVLAQADLAASMLRSGAANSKYELIQRLAERITLYADHIVVQLRPERLASLLGLPVSDEQAPVTLTVPAKRARKGHQIRLVIQGEEAELPKSPQRDEKAIFKLAEAFEARKLVTENPTLSLAAIAKAHGRCHKHLAKLIERSFVAPEDLVAIFAVK

SEQ ID NO: 7000 - protein, 570 aa, unidentified
  source 1..570: note = uncultivated organism
MEPQKKVRCAIYTRKSTDEGLEKEFNTLEAQREAGENYIKSFKHQGWEALPDHYDDGGFSGGNLKRPALQQLLKDVEKGKVDMIVVYKIDRLTRSLLDFAQLVKTLEKHNCSFVSVTQHFNTCDSMGKLTLNILLSFAQFERELGAERVRDKIAASRKKGMWTGGSVPLGYTLKNKKLIIEPAEAEIIRFIFEDYARTRSELLTTQHAIERGYTPKERKNKDGTLKNKEVFNHSMVNHILNNPLYLGKMPYKGELYEGQHKAIISQDLWDRVKSLKSDNLGNAFCPSRSVKNSLLKGLLECECCGTMIPTRCKRGNKYYEYYTTLKSVKEGAKAHPCKIGSVPAGELDTFVLEKIQQIFKSPKIMREMAKQLEEANPKYSANDAYNLANNIGEVFQYFEPATVHDFISEVVEKVVLHQEFIEIKLRPYGADIFENQLTEPDKCYCKESLVLKYPVKFGRKRGSMKIVEPTNPTKDMPARDEKLYNAVTQAFYLKNEMETKKISLAELSRREHCDHTYIGQVVRLTTLAPDIIMAIIEGRQPKLLTLRRLLRERFPYSWEEQRKELGFNPA

SEQ ID NO: 7001 - protein, 528 aa, unidentified
  source 1..528: note = uncultivated organism
MLDNTHTVSGTKKTQRCAIYTRKSHEEGLDQEFNSLDAQRESAEAYIESQKLRGWKMLPDRYDDGGYSGGTMERPALQRLLSDIDAGKIDVIVVYKIDRLSRSLLDFTKMIEVFNEAGVSFVSVTQQISTTDSTGRMMLNVLMTFAQYEREVIAERIRDKVAAAKRRGKYCGGAPILGYDVDRESKKLIVNPEEAKVVQYVFRRFIQLGSAKKMGQELNEQGYRTKSWTTKKGRVRKGVKWNTGHVYRLLNNRTYIGEIVHKDESYPGEHKAIVERKTWDKVQAVLADNKPVKVSMARTRIVAPLKGVIRCGHCGCAMGPTYTRKNDRQYTYYICEKDAKRTASRCPLKRVPAGDIEQAVIEQLSAVFRTPTLVAKTYFAAREIESVEKERLIRQKVQLEEELSQTRQQALELMKPGSDQSNKDEMLATVNRRAVDLSRQLTHVALRCKAYQGVNITEQDVSEAFQNVETFWQDLFPVERNRLIRLLVEKVEIRETGIDMELKTNGLTTLIAELAGLACEVNERRANR

SEQ ID NO: 7002 - protein, 589 aa, unidentified
  source 1..589: note = uncultivated organism
MEKTETTANENDLSVRDSSFWNGLLEMEAIFGLAPSGPDPCETPDSQAPPEPEPSEAADSRELTKSDTSKTVESLEPSIKYSTKAPDFSASAASSSKEKRPGKIHFPGRSFGDTFLDPMSSRPPAEESRPHLRTAAYCRVSTASDEQDQSIQSQKEHYEYLVSLHENWNLVSIYYEAGVSGTGTQDRPELQRLLSDCQAGHIDLILTKSISRFARNTIECIAMTRWLIAHGVHIYFEKEGIHTGTMQSELFLSVLASIAESESHSISANTRWACQKRFQDGTYLFSVSPYGYKLTDGDFHFHEEEQDVMQRVYELNLQGYGSFLIAKILNQSGTPRRNTTAPWDASVVKKLLQNPFYCGDVLFQKTYTDDYFQRHYNYGHQSQVYIKDHHPGLINHDTYMRTQELKAMRRRQYKSPDPSGKNHGSKRSCLSGRLHCPCGCSYQRTTVNQSVKRHFWVCRGHRLRQTNCQAGRLLEEDLQNIFTTLMNKLYFSRNQLLKPFLKSLKQLQKSAPPADQYQLNQNLQYTSALLQDVRKRKLQQEFNPRQFRKHVDYILIRQRPGEAALQFHMKCGLQLTEYLSQHQQAAKKL

SEQ ID NO: 7003 - protein, 520 aa, unidentified
  source 1..520: note = uncultivated organism
MIAIYSRKSKQTGRGESIGNQIELCRQYVRAHFGAEAADSARVYEDEGFSGGTLARPRFQQMMADAAAAPFRAVVVYRLDRISRSVGDFAGLIDTLERLGTGFISIREQFDTTCPMGRAMMYVSSVFSQLERETIAERIRDNMLELSRSGRWLGGVTPTGFRAQSVQRNNKTICRLQPVPGELRLVQQIFDCFLKTHSLTGTEAALLAQGERTRNGRPFSRWAVRGILTNPVYLRADEAAREYLRGIGAVLCAGAAEFDGSRGMMVYNRTARQKGGGQKPNPPTQWIAAVGEHPGLIPGRDWVLAQRLLEQNRHKSYRTPRSHTALLSGVLRCACGAYMRPKALRDGKYCYMCTAKEHSHRQACGVKNCPGRIDALVLKEIAGLSAPGALANALKSARLSPAPEQESLRAAVRENDARLARLSGSLARCAGTEAEAYVLRSIEDLHRRGEGLRRALEAQNAAAPADAEAIVNTLSDFGTLLRDMDLPRRRMTVRALISSLTWDGETAHLALGLPPCEDRK

SEQ ID NO: 7004 - protein, 505 aa, unidentified
  source 1..505: note = uncultivated organism
MVALYARQSIDKKDSISIETQLEYGKNICKLENLEYKEYFDKGFSGSNLDRPKFKELLKDIESGKINKVICYRLDRISRSLVDFSNLLVLFQKYNVEFVSATEQFDTSTPIGRAMINIIMVFAQLERETIQQRITDNYYARAKNGSFAGGNIPLGYTNKKILINNKKVSVLEQDSEQIQYVKEIFELYIQNKTIRNIANYFSKKLNKLITDKYIKRILMNPIYVKSDVKIYNYFKNKGYIIHNKIDEFDGTHGIIIYGKEKGKKGRVYTDISEQLIILSNNEPIIESNQFLYVQEKLDMNKQKTTAKKQGKYTWLTGLIKCKDCNHSIGIKVTKGYKYLLCSRHRLYNACTNKTSFKLDEVEDIVYNNICNYIKGLDLEKIENKKVDNSLLLNLNTLNIEKIKEQEKLNNIIEAIANGDKLSDILKDKAIELDNNIKELDKKILTIQTKIDNNNSNINLELYKNSMDLLLNKFNTLTIEDKQSVIKTFVSEILLNKDILEIKYNL

SEQ ID NO: 7005 - protein, 530 aa, unidentified
  source 1..530: note = uncultivated organism
MEQGFNSLDAQRESCAAFIQSQKALGWVPSPTLYDDGGYSGGNMERPGLKLLLADIAARRIKVIVVYKVDRLTRSLADFAKLVELFDSHGVSFVSVTQQFNTTSSMGRLTLNVLLSFAQFEREVTGERIRDKIAASKRKGMWMGGIPPMGYAPKERSLSIIEDQAIQIREIFNLYVDLGCVRTLKAELDRRGWITPERQTKRPGAGGKRPFSRGHLYRILSNPIYIGQISHKGEVFEGNHPALIDREVWYAVQDQLESNRQGVKGRVNAINPSLLAGLLIDASGQKLVPTHTKRNSRRYRYYVSGDLHEGTAPKQTGFRIPAHELETAVTDCITNFLENESLVLDWIEQQADRITLSVKDSLRAAKAAAELLATDGRKHLAQMVERIVVRPDRLEIAIKGNLLGEHKEPIHLGLQIELKRRGLAMRLVVNNDAQARGPDKKLLELIAKGHQWLAQLTSGSCDGVGAIAAKEKITSSYVTRVIYLAFLAPDIIEAIARGLHPADLNAEKLMRMVPLPEDWAEQRRLLKIDS

SEQ ID NO: 7006 - protein, 581 aa, unidentified
  source 1..581: note = uncultivated organism
MAELGKASTHSAKKKRCAIYTRKSSEEGLEQAFNSLDAQREACAAFILSQKHEGWTVLPTLYDDGGFSGGTMERPALKRLIADIEAGKIDVIVVYKVDRLTRALSDFAKLVEVFDRRGVSFVSITQQFNTTTSMGRLTLNVLLSFAQFEREVIGERVRDKIAASKKKGMWMGGFPSLGYDVQNRKLVVNKQEALTVLHIFQRYVELKSVHGLQVDLDGAGIRSKRRTRPDGSGYGGQKLSRGALYLMLQNRIYRGEITHKGNAYPGEHPAIIEKPLWDQVQAVLAANRVERATGAHAKQPSLLGGMIFDETGERLTPTYCVKKGTRYRYYVSTSLITGEVKDRSNGRRMPAANLESLVIQRLRTFLADQAAILDAIHNEYPDGSGQRRLIDRGRQLAKELETQAPDRIKAVLMILLSRVDVRSDRLEIQIRQRRLVGLLTGQPINPTMHDQLPSKESDDVLTLIVAARLKRVGREMRMLVENSDDQTAADPSLLRIIARAHDIQERLIQNTDLTVHDIAREEEVSGAYVYCLLRLPSLAPDIVTAIINGRNPPQLTAKKLMRLTAQLPIDWTQQRKLLGFH

SEQ ID NO: 7007 - protein, 522 aa, unidentified
  source 1..522: note = uncultivated organism
MHFATYGRKSVYSDKSDSVDNQQRMCREYVDFKFPGKIDSFETYSDEGFTGANTNRPGLKRLMDDVKNGLVDMLVVYQLDRLSRDVRDFANIYAMLEEKNVMFISIKENIDTATPIGKAMMYVTMVFAQMERETIAARVTDNMIGLAKKGFWTGGNPPYGYRRENIEVNGKKHVTIVPVPEAAEYVEWIFDTFLQNNYSLQGMETAFRKQGIKTVNGAFFSTTQLHKILTMPYCVQATPEVWDFYSNLGCQMADERDSWNGENGVMIYGRSTEKNKKHQLQPHDQWIVCSGKHTPFISAEKWLAVQERFRQNTFNKKQKYDIPLLKGTLRCAKCGGLMQVSRKKLVHGVTSHYYCLKRMRQGVDACDMRMIKCNILDDQVLDIFRQIEADPGIILKYTDIEEAHDDGTALKEMERRANNLRTKIERLAETLSDSESSTAAKYIVAQIEKEDLDLEALNREIEIAKAEARRNKNAAKTTEDRTAEIARLISGLDGFSAAERNEIVREVVQECTWDGETLFLRL

SEQ ID NO: 7008 - protein, 538 aa, unidentified
  source 1..538: note = uncultivated organism
MITSQDYVAGTSAKTLNPANPQVIVIDPILQVRSHKLRTAAYARVSSDSDDQLYSFAAQVSYYTELIKGNEEWEFVDIYADEGITGLRMDKRDDFLRMIRDCRKGKIDRILTKSISRFSRNTRECLQIIRELKSIGVTIYFEKEHLDTAEVSDEMLLTFFSGNAQQESMTISANMRWSYQNRMKKGTYVASSTPYGYALKDMVLTADEEQARIVRWIFDSYLSGKSMQEIAKELTATGVKRKNGESQWHHAAISYILQNERYIGDKLYQKTFATDTLPFQQVRNKGERDRYYIKNAHPPIIGRELFELVQQLIAERRTQYISSSSAEVYPFSRIIKCGECGTLFKRKISNGKTYWVCRNHNLDKNNCGLTPIPEPEIYAAFHRMYHRLKLNYDTILCPMLDQLQALKRHRNLSNLQVVELNRQIAELTERNHVLNGLKSKGIIDSALFISQTDELGRKIRSLKAEKNKLMEQDEDDSAIIETRNLIELLEGGPEHLDYFNETLFTSLVELITAASNQRLKFRLTNGLELAESVERTVR

SEQ ID NO: 7009 - protein, 562 aa, unidentified
  source 1..562: note = uncultivated organism
MTRIACAIYTRKSTDEGLEKEFNSLDAQREACEAYIKSQKHAGWIAVRDLYDDGGLSGGTMERPALQRLLADIKAGKVQIVVVYKVDRLTRSLADFAKIVDILDAYDASFVSITQQFNTTTSMGRLTLNMLLSFAQFEREIAGERIRDKIAASKAKGMWMGGTVPLGYDAKDRKLVVNSNEAAIVRTIFRRYAELGSVALLQEELNAKGIRSKQREGPNRRQAGGKPFSRGILYLILQNRLYCGEVVHKGKAYSGQHEAIIDAKLWDLVQEKLASNRRERSLAVAAEAPSLLSGLIYDSDGNRMTPTHANKQGKRYRYYISAPLLDRGQPGTNPIRIPASEIEELVLDRVRNLFGAPTEVVQRLEPLQLNARDLEGTLKMARTLTRTLTAHPLVEIRALVRDIVRRVTLQSREIEIRVSTQRLARCLGLALKDSGQASEDTFRLRVTAYFQRAARGKRIIVGERIDQNTDPQNLKLLQEAFAARALILSEGDESLTAMARRLGKCQVRLTGLVRLSYLAPSIVEDLISGRTRIALSAKRYLRRSKDLPLDWQLQRRFFGLPG

SEQ ID NO: 7010 - protein, 515 aa, unidentified
  source 1..515: note = uncultivated organism
MAEAETKRVRCAIYTRKSTEEGLDQAFNSLDAQREAGEAFIASQQARGWIALAERYDDGGFSGAHIERPALQRLLEDLDQGRIDCVMVYKVDRLSRSLLDFARLMERFDRQGVSFVSVTQEFNTTTSMGRLTLNILLSFAQFEREIIGERTRDKLSAARRKGKWIGGWPVLGYDIQAGRLVVNEREAEQVCAIYRIAAEAPSLEAVMQTCGRGGYQTKSWTSRGGKSHPGRPFHRMTLRLLLSNVLYTGAVSHKGVVYPGEHPRIVDQQLWEQVNQRLQLRSASQSGKPHRRHPSPLAGLLFCAECGHALRGTHTRRHGERYQYYSCRVARGKEKNLCSEKPIAAGDLETSLLHGLEPMLGINLAWDTVRSSVERISCQASSQRVSVCFRDGTQAEFGLRKTIRPGVKTGTEPDENVGRVPRVSRLMALAIKFEYLVREGRASSYRVLAEAGHVSRPRLSQILRLTELAPEIQEELLFLPKVVAGPDPITERALRHIARSVDWDWQRKQFQGLRG

SEQ ID NO: 7011 - protein, 530 aa, unidentified
  source 1..530: note = uncultivated organism
MKTAAIYSRKSKYTGKGESTENQINMCKEYLSKLGIYDYIVYEDEGFSGKNAERPEFKKLLNDAKKRKFQILICYRLDRVSRNIADFANLINILERYEIDFISVSEQFDTSTPMGRAMMYIASVFAQLERETIAERIRDNMLELAKSGRWLGGQTPTGFKSTPIVYLDSELKERKMFKLEPIEEELQLIKLLYRKYLELKSLSQVEKYCLQNDIKTKMNKDFVKSKLKTILTNPVYVKATKEVYEYLESKGITCVGEPDGIHGLYLYNKRKGKTDYKDISNWICSVAKHEGVIEAKDWLAVQKTLDKNKSLAPRLGKSKVGLLSGLIKCKKCGTTMRVTHGVYSKALGRAPHYYTCKLKASSGKARCDNKNAKGDDIERAVVDAIRNLCLDKERLIDELSKYVNGISSINAEKEIQRINAIIKQNQEAIENLTNTLSFTQDSNTAKIIIQKIQLLSLENEELKKKLSELNETVLLEESRQEKIILLAKSIEMFDTLFESSSFEDKRRLLTNIIDKVYWDGDSNSIEIVYK

SEQ ID NO: 7012 - protein, 520 aa, unidentified
  source 1..520: note = uncultivated organism
MNKVYKAGIYARLSREDEENSEQSSSIENQIALLTAHVTAMGAVVAGVYTDDGVSGTTFDRPGFKRLIDDIESGKINMVVTKDLSRLGRDITETSRYFQRYFPEHNVRYIAVNDGLDTGDPYNPTNDFFVFKTALDEMYACDISKKVRTVLDHKRKSGKFIGAHAPYGYMKDKNNRNKLVIDEEAAKTVVRIYNMYLKGLGFSAIADILNSQGIMSPSVYKSKNTNYVNGKNKYHLWNGVTIKNILSNPTYAGHLTQGKHKKVHYKSKKSITLPRRQWTTVYNTHDAIIDQQVFDLVQQMLKRRGSRQTGSIKKPRPLSGFVFCGDCKSPMTFATTSANKEYCICSGYKRYGKGYCSRHSILLSELEGLILEDFYSLIEHHMDLKCLDALTKAAEKNYSEQSLAAEVKHIKTKLEKLEKALTYLYRDKINNLINHRQFVDLYLPLKEEREVLKNRYDHLNEQLRLSKKPKAGINTARDMIKKLLDKSYIFTKRNLERLIKRIDVFEDKTLTIYYKFKAPH

SEQ ID NO: 7013 - protein, 521 aa, unidentified
  source 1..521: note = uncultivated organism
MKSITKIEPSAARPSAAKIRVAAYCRVSTGMDDQLVSLETQKSHYKDLISSNPEWVYAGLYYDEGISGTSKEKRPALQQLIADCEQGKIDRVLTKSLSRFARNTTDCLELTRKLLDLGVTIYFEKENLDTGSMESELLLSIMSSLAESESVSLSENNKWSVRHRFENGTYTIASPPYGYDNKDGELVINEEEAEWVRWIFAQALGGKTSGWIARELNDRNLKTKKNGIWRAGTIRGMLKNEKYTGACLYQKSYTDFRFKRHKNYGEKDQFMVEDHHEPIISKEDFETVGALLKQRAQEKNIQRGDPRYQNRYPFSGKLICGECGKNFKRHVNSTGYYRLAVWVCSRHVADKRMCSMKSVREADLEGAFTTMLNKLIFAKKEILEDLLDTLRGKAQKDSLRQIDQIDHKLELNAERKKTLTTLMTRGYLEPAIFTQENNEIAAEADALLSEKERLVKEVAGNMHQTDSLNDLIQYVAHAKPGTSFDGDLVGRFVDHVTIRTRTEIVFHLKCGLNLTERIGDK

SEQ ID NO: 7014 - protein, 532 aa, unidentified
  source 1..532: note = uncultivated organism
MTNAPRVFCLYRVSLKKQADFYYSNGKEVADIPVQKESCRRFCREHGWEIVNSFTEAGVSAYKNAIFKRDAIQTILDEAKSGNFDILLFYALDRLGRRDIELLSLFSQLKETGIKIWSIQEGELAFDSSMDHLLVYLLAWKANGESERTGQRVSSAQCDIVRNGDFRGGAIPYGYKLVESGKINRQGRPRHILAVHEPEAAVIRMIFRMIIDEGYSMYEMTRYLSQMELPPDTRTMVWRSSSLHVMLRNRIYIGQQRFNDNLFGPIDRLKIIDTDTFNNVQSIINKPKAKKVTKAESTDPPPLYHDLLFCGDCGGHLVYNHAFDKLKNGSYSLRYYYRCYNRERFSNPCTGASTFSAKKIDADVREKTIKLISFLLTSPAESLIRNSAELARAEYLAHRDELKLKLAELDNRIEVLQKQLTETLRQYGVEATSELQLIYADIRDKRNTAYKALQQMKPSHYEIDHLIKSKRREFLRIRKECELWNKKDWKQAEHMTFCFFERINVHQGYHLHYTIVPEVKQFLPVDTALAVE

SEQ ID NO: 7015 - protein, 509 aa, unidentified
  source 1..509: note = uncultivated organism
MKTRSAAIYARISFDPDGVSDSPEDQDARCQAEAQRLGYEVGNVYIDRSISAYKDKQRPALSEMLDAVEAGKYAAVVVWKLDRLTRNFNRGGDILRRIDDAGVKLVSVTEQIDTSTPIGKAIVGFQIAQAETESENTAKRVARKHSTWAAQGVAAVGGNRPFGYQQVKAVEGVSPASLVPDPTESKVVRKCVKRILSGESLRSVAEWLNESGVKPTAKGRGNGKWSGQTVRQMLRNPTLAGLRVLNGVETVGVWEPIITRDERSELLTHFATVKPSGGKPPERRLLSGLLRCGQCGAPMYVSVGRYKCYSAVGKEACGLVGAHAEHLEQFVTEQLFTFLGSVKLRPLPSQVDPDALRSSVEGATERLRDWDRRHAVLGEISREEWQPIHDELVALIESSREVLTAAESQPTSALQPGKREDLEAWWNAADISARRTALAHSIAGIEVAKVGEIRNRFDPNRVHIVWKWNMYELAEASLREWDAMSDAEKDAAWEADQATLTDAERYGAA

SEQ ID NO: 7016 - protein, 615 aa, unidentified
  source 1..615: note = uncultivated organism
MKKQKRNNEDNRGVAIYARKSRITNKGDSIGVQFKQCAEYAKRELRLDENYNFMEYEDKGLSSYYSDRPDFQRMLHDIEMGKIRAVVCYKLDRIGRKTSDLLRLLDFLEKHKVDLLICSNNINTASGVSKIFIQIFAVVAEFERDTLTERITDNMMELAKDGRWLGGNTPTGFTVKRVKTGSGKNKSAYSYLESIPEEKAMIQKLYAVFSETRSIKKTADRMNELGYRTKIGSKFNTSTTRLLLKNPVYCVADEIAYNYFYENGGGVCADLSEFDGQHGLSAYNKTDQEKFEDADSTFISPKFVQLMSAKPVSKWIISVGRHEGFIPSQQWIDTQNMLDSIAEKYNRPHRKTNALLAGLVYCPHCGKRLRVISESNRWTNNKPRFKYVCPGYRENECTFQSVDGVLLDEFVVQQLSNLSDEDSEYFTKLLNQRASDIFKNSQNEQELTELKKKKAQLKTAIFNQVKNMRDASDDLKRFIQEDIQELSNELREVGILLEKLEDSKQNQMYAVRNIEEIKERLLSFGKYAKGAQPDVLITLIQSFVERIYIVEKNDERYCHIFIKGCTKEDYDEFFRATGYISGTREAGAITSKLPLCDSDECSKYNVIFAFPLCMC

SEQ ID NO: 7017 - protein, 501 aa, unidentified
  source 1..501: note = uncultivated organism
MKCAIYTRVSTDNQVEVEFNSCEAQEEKIKSFIKSQENMEIFNVYSDPGFTGANLDRPALQELLNDIKENKINLVISYKIDRLTRSPKDFYQLIELFDKYEVNFISVTERFDTSTPSGRLLRNIMLTFAQFERELTSERTKDKMLQRAQKGMWNGGLVPFGYKVENKKLAIKDDEAKIVKRLYDRYVSKDLDSRFRGNDGVSKGRIAYILRNPIYTGKIRYDNKLYQGNHEAIISEEVFNLAQGLHKEKYRKMRIYKDYALAGLLQCKECCSTMTPCHTNKKRNQRTKHYYYYRCTKTFKENWDSCSIKQINANRLEDYIFKNLERISNDKHYIDNLIFKLNNSQAGGRIRLGLSSESSKISPEIFGQTLCFFVKGLSERKGIDKNIWVKNFIKNILYSKEEIFITFYYKRAFGEELDDLFGSGRPHPTAAEKAEAQEDKKIPPISTDRGKETYMAPRAELEPLPLWLQTLNQCLFIINHSFRQQPKHALRQLFLLLILVL

SEQ ID NO: 7018 - protein, 530 aa, unidentified
  source 1..530: note = uncultivated organism
MTKSNHRTLASTAKRMACAIYTRKSTEDGLEQEFNSLDAQRESGEAYIKSQAGEGWDCVPDQYDDGGFTGGNMDRPALRRLIADIEAGKVQCVVVYKVDRLSRSLLDFARMLEIFERHNVAFVSVTQQFNTTTSMGRLMLNVLLSFAQFEREIISERTRDKIAAARRKGKWSGGMPLLGYDVDPRGSKLVVNNEEAARVRTIFELYLEHQSMITTIKELDQRGWFNKRWTTRKGTPRGGLPFTKASLFKLLTNVTYLGKIKYKDEVHNGEHAAIISPELWQRVQSLLHHNGRTGGATVRNQFGAILKGILRCVPCDCAMSPSHSTRKGTKRYRYYVCTKAQKRGWHNCPSKSIPAPEIERFVVEQIKAVARDPAFLQEVVDQTRIQAQSHLTQLDAEQRSLERDLVQWNAEVRRLVPKISSDDSESPAIARLADLQDRIRGAERRATEVREQIVAINRDLIDQQDVAKAMSVFDPVWESLTLREQARIVQLLVERVDYDGSTGKVAITFHPSGIKTLANEVNHAKSEDAA

SEQ ID NO: 7019 - protein, 542 aa, unidentified
  source 1..542: note = uncultivated organism
MRRIRCAIYTRKSSEEGLDQDFNSLDAQREACEAYIASQKHEGWELLPERYDDGGISGGHLERPSLQRLMQAIDEKRIDQIVVYKIDRLTRSLADFVKLVDRLDAAEASFVSMTQSFNTATSMGRLTLNVLLSFAQFEREVTAERIRDKIAASKRKGLWMGGNVPLGYQADGRTLKIDDGEVKTIRTLYNLYMEHGIIRKVKERAEELDLKSRRRVRGAGRVSGGQPFDRGHIHRILTNPIYAGRIRHKGQAYEGQRPAIIEPAVWEQVQQMLIDGAAKARGMIGKATRSLLAGKLFDETGDRLTPSHSKKNGKRLRYYISHRLVKDRSRKHPDAWRLPAEQLEGLIADLVRERLKRHDIATQLVRDLPASETMATLAKLETVKQTKQCLALISRADLRPGKLTVHLRQEEVASLLACKPDRINPTALILETPCRMRRRGVELKLHLGDAPREVDRTLVQNIVKALRWMAMIVEGKTFAAIAEAEGTSKRRIQDVVDLAMLAPDILDAIAAGEQPDGLTSDYLIKSGVPAVWTEQRAQFTKL

SEQ ID NO: 7020 - protein, 526 aa, unidentified
  source 1..526: note = uncultivated organism
MSYLMYLRKSRADKEAEARGEGETLARHEQILSELAAKMDLPIGATYKEIVSGETISSRPKMQQLLIEVMQGQWDGVLVMEIERLARGDTKDQGTVAEAFKFSNTKIITPIKTYDPLNEYDEEYFEFNLFMSRREYKTINRRIQRGRVAAFQDGWYIAGTAPYGYEKIKRKGDKGYTLDIVDNEAQVVRMIYDLYTHGELQDDGSYLRFGSYQIKDRLNDLHIQSRSGSTWSAATIIDILRNPAYAGYQRWSWRKVQKKLVGGNIVESRPKNDDCPKVKGRFEAIITDEQFELAQKIREGKPTPIRSTNALQNPLSGLVYCEKCGTLMTRQPSNTKDHYPVLRCPNSKCTNISAPLYLIEQKLIEGLAEWADEYELNWPKKDWEDTEISTATYQHSVDSMQGKLDTITKQLSAAYDLLEQGIYTLQIFQERRSTLENQKEETETELQRLNRELEISQARARAKREFLPTIRHIVDTYWTIDDVFVKNTMLKEVLEKVDYLKTERNKKGGRGNANFSIYFYPRVPKF

SEQ ID NO: 7021 - protein, 566 aa, unidentified
  source 1..566: note = uncultivated organism
MQGEKQSGNQNRVAIYIRVSTTHQIDKDSIPMQRNDLVSYARLMLNTDDYAIFEDAGYSGKNTDRPNFQKMMSQIRSGAFTHLLVWKIDRISRNLLDFSSMYKELKELGVVFVSKNEQFDTSTAMGEAMLKIILVFAELERNMTSERVSATMISRASNGQWNGGRVPFGYDYDYESKTFSINKQESEVVKLIHDKYEEMQSLVQEARYLNEHNFTTREGNEWSPVTLLIILRNIFYCGDYQYNTLKEGNRQKIKDRSEWIIVENHHEAIISKEQKERIITKLESRRRLDKRIRETKNIHVFSSLLICSNCGKAMWATPTNRKNDWACSKYVCKSYARRISPKCKSVSDPIIGEFVFNLVLNIMNSQKAIDEIHSVKELERRLLTGVAFSDVESIEHDGLEELYTVLYENDKSMDAFGKPQKIVKKKAVSELSKLRSEKKKLEIALDRLTNLYLFSEIAIPEKEYLIQKTKLTSSLDEINESIGIINSGEWNQSMSDTEFIRQASEFILTKKLEERNYVSYKSLAMSVDNSVLKAFVEKIVDCITVESGRIQKIIFKNGIVQKFNYK

SEQ ID NO: 7022 - protein, 540 aa, unidentified
  source 1..540: note = uncultivated organism
MSKENVTIAYALYRVSTKQQVDKTKDDIPMQREACHEFADRMGWTIGKEFLEKGVSGFKVSAKDRDAIQDLKDAALKGEFQILLVFMFDRIGRIDDETPFIVEWFAKHGIKVWSVQEGEQRFESHVDKLMNYIRFWQAAGESEKTSMRIRTRMQQLTAEGIYRGGPVPFGYHLVNNGRLNKKGKPLYDIEVDPEEADLVRMMFEKTVKEGYGTHRLASLMNEKGIKTHNGSKFQCNTINRILRNRMVTGYLVTKNAKSPFLPQLKIVDDYLFNRTQEILEQRVVKNEERHSVALTTRGQDLLSGMMYCGHCGGFLTSYEHRRKHTLADGTVKVYKQRRYMCYHRTKKLCDCDGQGTYVVARIDKAVNAAVEEMFRHIKDAPDEKELAKAFNKEAASCKAKKTKLNLELSRLTKQKEKLEQEILKALMGESGFTSEQLSTLLKNVQTEIDDVNEKLETLESEVASKKTSIENIRPQYENFRTWAEEYDKCTVEQKKMIISQLVDRIEVFRDYKINMIFNMTYKHFCEDWNTATGINIIETK

SEQ ID NO: 7023 - protein, 668 aa, unidentified
  source 1..668: note = uncultivated organism
MQAAIYTRMGKQENQVEKAVGYLRLSKDDGDDIESMSISNQRKMIAEYAEHNNFVIEEWYVDDGISGYTMSRPDFNRLKRDLNNNKVHTIIAKDFSRIGRHNAKVQLFLENILEDGKRVLTITEGYDTLDPRTHSYVGIHGWVNENFIRETSTKVRNSITILQKEGKWLCSIPYGYIKDPRDKYKYEIDPTTAPYVKQIFDMYIEGMGVKLIAKKLTEMNIPTPSMVKKMNKEARGEVCRRKASTTWGEVAIVRILRNEFYTGTLVLGKSKRRSINGKSIPQPEENRHVFRDVHEPIIDKHTFNLVQSITVERAEKDYRGKKVQTRPNIFAGLLYCADCGKTLTSNSGRANNTRYICRTYNVAGVSHCTSHAVSERDIRFALLDFLSYCRTNLTNIIEDLDNIIRAEIQVRGKSEDGIEIIVEKLQNTKKSIEVLIEQKMRETMKNPTMIDMIDKMYDEMLNEKYKEVQILEKQLNDQQQLNLDEVEIKNGLNNALSIINDILATENITKKQVLMLVDKIVVHEDTGIDIYLKGDLHKICSNYFVVKGSTKNQIKKLVCDFILEHPKKFTTNECEVYVRDNGIRISYKKISKIIKEDLLANDLIKIRPMNHGYELIANPEDLKAQLIPNIVGNISGSLRYNSVIIDVAKSICQWLENINSKNNKKNLF

SEQ ID NO: 7024 - protein, 572 aa, unidentified
  source 1..572: note = uncultivated organism
MTKEENKKFAIYSRKSKFTGKGESVENQIEMCKQYIRLHNPNVSNEDIFEYEDEGYSGKTINRPKFRIMLDDARNNKFETIICYRFDRVSRSISDFSNLIQEFDKLKISFVSIKENFDTSSPIGRAMMYISSIFSQLERETIAERIRDNMRELAKSGRWLGGICPTGYKSKELVNKMTVDGKEKKAYKLEIIKEEAEMVKMIFSKFIETNSLTKTETYLRQNHIKTKNDRNFNRFSIRGILSNPVYMKADKEAWDYFNSYGMEIYSDQFAFDGKYGVMAFNKTIQTTGSSNQIRDMQDWIVAVGKHKALISGTDWVKVQKMLNMNKSKSYRKPKSNVALLSGLLFCAHCNDFMRPKQSQRLNANGEKIYNYLCETKEKTKMQDCRIKNPNGNELDRVVCDKIKELSEDSSDFLKGLEKGRTLLAVNSDEYDDKLNNLRKNHKDNEKKIKLLLESLTEADGTAASGHIINQINELHERNEMLKNQIEDFVSLTKDHAISDIEFDVMKEMLKNFSTTFDSMSVEEKRIALKTFIKRVVWDGENIHIFLFGDNDRGVSFAELLDEYGEPQCEGTK

SEQ ID NO: 7025 - protein, 584 aa, unidentified
  source 1..584: note = uncultivated organism
MEIKEKPRAIIYCRTSGEESENESSLDTQKNDCVEFCNYKKYQIIDTIQDNGYSGANLKRPGIQKILELARKKEFDFLVVWKLDRFSRKVLDCLTVLEELDVLEIKFLSVNEPFLSTDSAFGKFTLQILSVIGELERENIKMRTQNGRNAAMRDRGHWHGSPPYGYEKDEEFRLVPNDDKLKIVRDLYHWSAIEGISLNGMAKRLNDRGLRTTKNKKWTGTTIRNIILNPIFIGKAVLRRKQKKELQIPYYTDPIISPELFERARVTMNSNRNSLRGTTKHPATYAPYLYCARCGGKMYPQGKYTKKQGLIISYSGNRNNKDKPKSRCSNCGWIRQPLLDFAILPQLSKIINTPEFWLNNLEEKKVEDLTPILEIENRALDNLNKARGRVGEKWDMGFYKTQEECQKALKEADRAVDLKMNDILLIKQRMASQGDKDMVLNAIKGAIVKMGRVDTPEEIMKLVVHKIFIDTKSRRLTIHLRIPMIKPVEGIYPAEVKLEAKQKVLDEMLKPTSTESAIKVILGIARKIDPRVVVDKSLLGKKSNKYHYSWCASVSKIKEENKLWFNSDKEAEAAGYTLAGNCSR

SEQ ID NO: 7026 - protein, 552 aa, unidentified
  source 1..552: note = uncultivated organism
MDKTPAKATVLRCAVYTRKSSEEGLDQSFNSLHAQREACEAYIKSQAHEGWICLPQAYDDGGFSGGSMDRPGLKALLADIAHRRVDVVVVYKVDRLTRSLADFARIVEAFEADGASFVSVTQAFNTTSSMGRLTLNVLLSFAQFEREVTGERIRDKIAASKAKGMWMGGTVPLGYDSKDRTLVVNAAEAEQVRHVFERYLALGSVDALCAELEHQGHRSKRRTTRAGEVIGGAVLTRGAIYHLLQNRTYRGDIPHKDKTYPGLHAAIIDQDLFKAVQGRLAGHRISRRQGSVRHAAAKLTGRVFWADGSPVTPTFAYGRGGRVHRYYIAKSAKGAGSPADGPPRRIPAVAFEGFVLATLRRLAGAPDADWGILLPALDRIEVRALDTHLIISSALLVAGEHPNLALDAVRGRLRQGEQALVEPGDGRGLRITTPLRSSFRGGRTWLTDDKGEAAVAVPQIRSSLVGALKQAHAILGRHGLAAGGEEALRAAKAPANPYHRKLCRLALLSPKLQRTLLEGKAPARLMLQDLLAEPPPILWSDQEVWFARVCRA

SEQ ID NO: 7027 - protein, 519 aa, unidentified
  source 1..519: note = uncultivated organism
MTAEKPMRCAIYTRKSTEHGLELEFNSLDAQREACEAYVKSQTHEQWRALPQRYDDPAYSGGSLERPALQRLLADIDAGRVDVIVVYKIDRLTRSLSDFAKLVEIFDKKNVSFVAVTQQFNTTTSMGRLTLNVLLSFAQFERELSSERVRDKVAASRRKGKWTGGGIPLGYDVCDKKLVANPAEAQTVRFIFQRYLDLKCLRLLNDELNLRGTVTKRRATAAGKQTGGRRFTYGPLAYLLKNRTYLGEMGHKGQWFAGEHEPIVDRQIFDQVQEALRANSVVRRQQRTATNSLLAGLLFDDRGNRMTPSFSTKRRVRYRFYVSSALLLGRRNEAGSLTRVSAPNLELAVTSTLRERFPPSTDLSGQDLIATHLERITLSLTALQIIFKGGDQVEMPWSGTRPAPFAQIETEKCQPATEPDIALVHAVARSHFWLKGLSDGSYQSIEELAGVVEWHPKVIRKLLRLAFLPPDITEAIILGTQPKALTLSALQELSPLSWREQRRSLIFLPQAQTTHEVAS

SEQ ID NO: 7028 - protein, 534 aa, unidentified
  source 1..534: note = uncultivated organism
MKVAIYSRKSLFTGKGESVENQVEMCKQYIKFSMVDVEVADEDIFIYEDEGYSAKDLKRPQFQQMMKDLDTYKFEYIVCYRLDRLSRNVSDFSGLIELLNNKGVNLICIKEHFDTSSPMGKAMMYITSVFAQLERETIAERVRDNMHLLARTGRWLGGTPPTGYQGAEESEVIVDGKVKTSHKLVFSDEIETVKLMYNHFLETHSVSAVSKYLIAKKIKSKTTGKYFSMLGIRDILQNPVYCIADENAYLYFSENGSDICQNAELWNGEHGVSTYNKRDYSRSGAPRNALNEWIVAIGRHEGIVSGKDWVSIQKYFHNNHKEKIVNHSEVGLLSGLIYCTKCGEKMFSKKHKATSDNFSYICSSKLKGNNVLCDCPNLTGQQTDDLVVDYIKGELDNFDTFTSALENLKREYEKEQNDDKTDKIKKDIEATQSEINTLVNRLTDTTLSQVSINAIDKKIVEQTEYLHTLESELAEQNQSDDDIDFDTDALIESVKSFKDLFDELSIYDKRQIIRLLIQKIEWDGADLHIFMYGE

SEQ ID NO: 7029 - protein, 536 aa, unidentified
  source 1..536: note = uncultivated organism
MKAGSIKKLLRCAIYTRVSTEQGLEQDFNSLDAQYEASQAYIRSQAHAGWTLVRTKYDDGGFSGGNTDRPALQRLLDDVRFGKVDVIVVYKVDRLTRSLADFAKLVELFDAHDVSFVSVTQQFNTTTSMGRLTLNVLLSFAQFEREVTSERIRDKIAASKRKGLWVGGMVPLGYDTKDRKITVNEREADAVQTIFRLYLKLGSLNLLMAELRNQGIISKTRTLRSGKTVGGIPFTRGPLAHLLRNRFYIGEVVFKGEALKGEQEPILDRKMFEAVQAKLDDQANGHERTRTRSGALLTGRIFDDAGNCMSPTHARKGGVKYRYYLSSALLNGAAERAGSVARVPAAQVEAVVVRAVREHRKIAAAINDRTLVATHIGRVEVHPERLIVRLVRQEVAANDSVGPDNALNVPWQKTASTRRREILVPEGVSAQDARRIRPENRATLVTSISRGRRWLEELVAGPDATTETIGKREGCTARKVNMTISLAFLAPSLVKAAIDGALPHGMGVVRLADLPPEWSQQHKMLGLPWHAAAISK

SEQ ID NO: 7030 - protein, 560 aa, unidentified
  source 1..560: note = uncultivated organism
MAERKLRCAVYTRKSTEDGLEQEFNSLDAQYEACAAYALSQQHEGWVVVKERYDDGGFSGGNMERPGLKRLLSDIEAGKIDIVLLYKIDRLTRSLSDFSKIVEVMDAAGASFVSITQSFNTTTSMGRLTLNMLLSFAQFEREVTGERIRDKIAASKKKGMWMGGPVPLGYEVRDRKLVVKPDEAHQVRHIMRRYLALGSVPVLAVELNAQGYRTKVQQRTSGPHRGGCIYRRGTLYHLLSNRMYRGMIVHKGKAYPGEHQPIVDEDLWNEVKALLESNACGSSRRKRHQHPSLLVGKVFDGEGRSITPSHAQRGRKRYRYYVTRPDEVDGSPAWRVNAHDLERLVCEQIAQRLDPDSLKLVRADTSNPSARSILEVSEKAADITSILQSGKVHAKANLLEKILGRVDLDSERVTIALDRAGLAHQLNLPPELLEDDFLQLIVPAVRVRRGHQLRLIIPGPGQAKVQPPRIDPKLIALVADAITARELIETHPDQSIASIAEQHGRCRTRLGKLVQLACLAPEIVKAIVEGRQPETLDAKRLARITLPLEWARQRDVLGFT

SEQ ID NO: 7031 - protein, 567 aa, unidentified
  source 1..567: note = uncultivated organism
MKNVIKEQRKKGIYSRKSKFTGKGESTHNQIEACKRKIGLTFDDVDLENDVIVYEDEGYTGYNTNRPAFQKMLKDIKDKKIDTVVFYKLDRISRNVSDFSSLVNEFDNYNVSFLSATESIENVTPSGRAMMFMISVFAQLERDTIAERIRDNMLELAKTGRWLGGNTPTGFKSEKIENITLDGKIRRLYKLSPIEDEINIVINLFQKYRELKSQTKLETYTIQNNIKTKNGKNYTRLGLKNILTNPVYAVADKDTLEYFKSFGIDIYANEEDFNGTHGLMVYNKTKQRGSKKIVERKDITDWIVSVGKHKGVISGKDWVEVQDILEKNIDMRYRKPTTSNALLSGIIRCSHCGSFMRAKMKNKTVDKLGRRRFDYMCELKEKSRMQKCQSNNIYGLEADDLVMAEIKKLAMPTSEFYKALKNISSNTFNKENKNNEEIKTLKSLICKNQNEISLLLDKIKYVDVSLLDDLSNEIKKLKETNLELEKQIKALANTNYNEVSDKETADILLNILDTYFVSFDTLDLNTKRNMIKLLVSSVTTDGKDITINFLGARNTKGERHPSGMNCK

SEQ ID NO: 7032 - protein, 507 aa, unidentified
  source 1..507: note = uncultivated organism
MKRVAIYSRKSKETDTGESIKNQIQFCKDYFLRKEKDYKFEVFQDEGFSGGNTNRPEFQRMMLQAQQNKFDIIACYKVDRISRNIIEFMNIFDILQKNDVSLVSITEGFDPNTPVGMMMMTLLAGFAEMERLNIAQRVKDNMQALAKLGRWSGGTPPTGYKSVRLPNGDKTAMYLEFIQEYEDKIVELFSLAAAGNTLYNISTLTKIPDKTITNIINNPVYCKSDLTSKKYLESIGYEVFGELNGKGYLPYNRRPKNKKGKKLFNAKGMFATVSMHDAPISSDLWIKANMEVKQRGEERRPRISQYSFLAHMVKCGCGSGMYIDPGHKKKDGTRKYYFCCSAKKSGSNCTNKRIVANYLEDDILDLFKDFTLNKDKLREYINKKPVIDVESEINKIKKEIKKLDINLDNLTNQLSRLSGTAADKVIESMNNLSKKIDDYKNRIFELERKRISSKIDKINIDILQDNIKKMLISWDNLTMEDKQKYIRNIIKEIKWDGGENFNIIFKI

SEQ ID NO: 7033 - protein, 502 aa, unidentified
  source 1..502: note = uncultivated organism
MYYRVSTEDQAQFGVSLEQQRKQCQSYADMHDIEIIKIFHDDGVSAKTVDRPSLQGMLKFCGQKSNGVEVVIVYKIDRLTRNVNDYSSILMLLSKLGVKLISTTEAIDSTPIGKFIGNVMAANAQLDNDIRSQRVSACMREKIEQGIWCWKAPYGYLNARDGLSKKIITVDKKRAPMIKFIFREYATELYTVEDVRVKVNKMGLRSWSGKEISPQLMNKIMTNKFYIGIMTSRGEEFEGTHEKLVDRQTFFKCQNLLNGKSRGDNVSESQASEDFPLRHFAVCAYCGRPLTAYISTGRWGGKYPYYRCYNRNCSSKKSIAKKKIEDDFRGCLQEITPKDKFLNGFKAVVLDVWEKQYKRINEDKKDRDKQIEALKEDKMKLIDMKKKDLLSDEDFREAFDRIKKEIEAKEGESPETKMEEFNIDEAVEFVFDYIKYIPETWKGSDLKQQLVLQGLIFPEKPIYDYSSFQTPKLCPILQAKKELAGASSSVVASRGIGPLLSG

SEQ ID NO: 7034 - protein, 506 aa, unidentified
  source 1..506: note = uncultivated organism
MRSVARHEDNHAKPVGVWIRVSTEDQARGESPEHHEKRARDYAALKGWRVREVYHLEAVSGKSVMGAPETQRMLADIASGHITGLVFSKLARLARNTRELLEFADIFQAQGADLISLHESIDTTTPAGRLFYTVIAAMAQWEREEIAERVAASVPVRAKLGKPLGGQAPFGYMWKDRQLLPHPDEAPIRKLIYELFLQHQRKKTVARLLNDAGHRTRTGARFSDTTVERLLRDPTAKGERRANYTKSLGDHKRWVMKPESEWVLSPVEPIVTEELWEQCNQSLRDRSNGRKPARNAVHLFAGLAYCTCGQKMYVPSNSPKYICYRCRNKISVTDLEGVFHEQLKSFFFSSTEITAYLQQADHTIKEKRELLETLEADAQKTKREMDKLYNLYLADEISKEGFGARYHPLEERQKQLADRMPHLQGEIDFLKVQYLSSDEILSEARDIYSRWPELEQPAKRKIIENILQKVVIGKEDVAINLAYLPSSAEIMTERQRNLRGSSRRPA

SEQ ID NO: 7035 - protein, 543 aa, unidentified
  source 1..543: note = uncultivated organism
MNDENKRFAVYSRKSRFTGKGESIENQIELCRRYINLNYPNASEKNIFIYEDEGFSGGNTDRPQFKKMMDDASEKKFNVLICYRLDRISRNIGDFAKLIDRIGELGISFESIKEKFDTDSSLGRAMMYIASVFSQLERETIAERIRDNMHELAKTGRWLGGNTPTGYRSVQVQTITVDGKKRSSCMLKIEESEMTAVKKIFEKFLESESLTAVETYMIQNHIKTRKGKDFSRFSIKGILRNPVYMIADSDAWEYLSVLGAEIFAEKSDFDGNCGVMAYNKTLQKKGKTNKIRDIKEWIITAGRHKGVVSGKEWKQVQECLERNSVKAYRKPKNNTALLSGLLYCGDCGHYMRPKIYNSFYKDGEKKFSYLCEMKEKSRRSECSVSNPAGNELDAEVIKEISKLEEDKKELYYILNKAKKTFSDGRGSNTEIEELNEGLNVNNRKIASLVENLTELEKTVADKYIIKKIEELHKENELLKKRLYELIKTSENKKSVDVNYITDTLTVWESVIKLTEVRERREAVRTIVDKIIWDGESAHIYFFG

SEQ ID NO: 7036 - protein, 645 aa, unidentified
  source 1..645: note = uncultivated organism
MNEEKKIAGLYIRVSTEDQAREGFSLPEQEKRLRAMCEYKGYEIYDVYKDAGISAKTGNLRPEFERLLQDIRDKKVNTIVVLKLDRLTRSVYDMEGIMNFLEENDAYLDCANDDINTTNANGKMVARLLTTVSQNEIERTSERTKIGLAGAIKVGHIPHKAPLGYKHEDKKLVIDYATKDVVIRIFNMYHDGLSYKKISNILNEEQVLGKTNWRDSTIVNLIENPIYKGDFIHGKRTKKPTYYKDVVEPLVSKEYWEECQVQQKKNSRSYKRVENYLFLQKLKCPKCKRILGGKATTKKNGNVYYYYYCNDCKINFKEGEIERQIDQYMDSIVEYDSIVNQYFLPMIKQKIENPKEELQKELKTQKSKFDRIREAYINEVFTLKEYNEERKKVEDIINELEDKLSETEVCEKLKFTPNDILVKRDIDFINSIKYPEKYKDRNKFWNDYTREEKADLIMKYIDEIELTDKYGNNADVDYIKFRESIVNASNELYLNGYYDRYIPSLFGNIYGRIRFSEYLPEKEVGEQIMRLRQFYDVGYYEATYNVKNQVFYFNFIEDNKTLVRVFPLEDYRKIDPNIKMDTYNLGVLYVKEDNGTLLEHVDDVFKYIPAECESNVVYSKEPIYVESKPVLYYEVEENSKEVSSS

SEQ ID NO: 7037 - protein, 541 aa, unidentified
  source 1..541: note = uncultivated organism
MSGARRRPGSPNGKQPEPKRRCAIYTRKSTSIGLEQEFNSLDAQREACEQYIAARACEGWQVVPEHYDDGGFTGANIDRPAFQRILADMEAGKIDVVVVYKVDRLSRSLLDFAQVMDRFNRSGTAFVSVTQNFSTADAMGRLTLNMLMSFAEFERSMIAERTRDKIVASRRKGKWTGGPVPIGYDVADKHLVINELEAVVVRELFDLYEQHRSALAVARLLDEAGRTTKRHRANNGNVREGKQWTKDAVLRVLRNSLYAGYMPCHGELHEGEHTAIIDRELWQRVVDLLDGKTGPRRPGSRNPAYLLRGVLRCGRCGMAMTPASTRKKDGTEYRYYRCVTKDKKGRGACLARPLPAAAIEGFVVERLREATASGGLAKDVRTKLLGKLDARRKGLLTERRDLPARIASLSAEGRNLVETLGQARGTAHRLLEERIEDIGGQLAACEVRLAEVERALSNLDRTEIEVRWVAETLARFDAVWDVMTAENQVRLVQAVVERVEVDEPSGRVTAVLADLGADDEDDQADTAPRPATAQPTMETTP

SEQ ID NO: 7038 - protein, 536 aa, unidentified
  source 1..536: note = uncultivated organism
MNNPERKVTVIPAKPMAERQAMKRQLRVAAYCRVSTEEEEQQSSYEAQCSYYTEKIMTNPEWTMAGIFADEGISGTSTKKRENFNRMIRKCRQKKIDLILTKSISRFARNTVDCLKYIRVLRELGIGVCFEKENINTLEMDTELMLTFMGAFAQAESESISENVKWGKRQAIREGNVFVNFKRLYGYTLNENGDPGIEQEKAEVIRSIFDWYLAGDSLRMIKQRLEDAGIPNPSGAAEWKTSAIKTILANEKYCGDALGQKTFKDNVMSGKIVKNTGQLPMVLVQNNHPAIVSREIYQKVQAELARRNAGRSPSQKSAPTGRSCYASKYALSERLVCGECGTLYRRCSWKGEEKPRIVWRCVSRLDYGKKYCHNSPTMYEEPLQQAILVAINSVMQPKDELVSQITDAMAQEIAKLPGSDMTLGEIQRRLEELNQRFDALLSQTEDVEKSAAQFKALSDEMANLKSRQEAIASQFRQQGRAGERFQRAADAVIQLDHRLTEWDEAIIRQLVHTVKVISADQIQVILTDGTEVEQKI

SEQ ID NO: 7039 - protein, 566 aa, unidentified
  source 1..566: note = uncultivated organism
MRKNEDFIAIYSRKSKFTGKGESIDNQVELCKQYIRDHYGEQAVERCMVYEDEGFSGGNMQRPAFQEMMKAAEQRKFKAIVVYRLDRISRNVSDFSTLIETLKRLDIDFVSIRELFDTSTPLGIAMMYIASVFSQLERETIAERIRDNMHELAKTGRWLGGTTPTGYTSKAVKSITIDDKEKKSYKLKLIPEEAEIVRTIYALYIQFDSLTSTETELLRRGIKTKNGNKFSRFAIKGILQNPVYAMANQDVYNYFIKKDAELFSSQEAFDGVHGIMAYNRTNQEKGRAAKILPITEWIVTVGKHPGIISGKTWVTIQESLERNKCKAYRKPRKNEALLSGILFCSCGEHMYPKISKRKTPDGKPIYTYVCKMKETSRRSICDSKNINGNVLDDAVMEQIKSLAEDKSAFLQQLEQSKRFYAGDTNNYEDQLTSAQKEKSELEKKINALVDSLTELHDSSAKEHIIHRMEQFHQELEQVETHIHELEGLLERQTLHDHEFIVLQQLLTDFRRGIDAMTIEQKRAAIRTLVRKIIWNNGTVQLILFGVQDNELDLISPPKTHLCEDSK

SEQ ID NO: 7040 - protein, 544 aa, unidentified
  source 1..544: note = uncultivated organism
MARKSRKQTGAPMPAPSLYVYVALYIRLSVEDNKKRGCSVENQKLVLNDYLADKPDFVVYDTYIDNGLTGTNFHRPGFQQMLSDIEAGHINCVIVKDLSRLGRNSIDTGYYIEQYFYAHNVRFIAVTDQFDTADPGNLHGGIMLPLKNMINEAYSLDIGRKIKAQARQAMKDGDYIGGRAPYGYRKDPDNCHKLLVDKETAPVVKQIFDWAYERVALNRIVRNLNEMGIAAPSHYKKSTGEITSPGLIGSGKWQTRTVMKILESEVYTGDLVQGKTKTVDHQQVKADDDNLIIARHTHEPIISHEVFAAVQEYRKQVCEESRAKPKIPYTPNIFKGKVFCADCGRSLHRQRAERKKGPDIYWFHCLTNSRVAKDTCKGVMMQETELIATVTAILEKELSVALGMSLPLFQLEARQKQKKDGLKSQMSAKRQDIEKQRRLIRGLYENFVQGILTSEEYFELKAGYEESITVLSGDIEALEKDMDALDDQLVRYRAMEKDAKSLAQDHVLTAELIERLIERIEIDHERNIRVSFRFKSEFQGEAVK

SEQ ID NO: 7041 - protein, 511 aa, unidentified
  source 1..511: note = uncultivated organism
MAQVQVIQPYQPQSDALEKVAAYCRVSTDSSDQLNSYRTQIGYYTNFIAQHPGWELADIYADEGITGTSLEKRDEFKRMLQDCRAGKIQRVLVKSVSRFARNTLELLETTRELKDLGVVVVFEEQGFDTSQMYGEMQLTLLAMAAQEESASISKNMRWSYQKRMEAGRYITTKAPYGYAFVNGGLLPIPKEAAVVQTIFQLFLDGNGQQKIATMLNEKGIPSREAPKWGRTTVEHILSNERYIGDALIQKRYTTAALPHKQKKNKGELPQYYITGSHPPIISREIYEQAQRLKESRFSETRRAPHTFTHRIQCPSCGRFYRHINSSGTSKWACPNRVNKVKDCPNYWISETAIKLAFLNMAGKLYCHHESLLITTIKLLEEIAARQERGNAKLYELNTALADLNEKAHTLQRLHNRGFIEDADFREQSDALASQRKKLSDQRTQVTHGSKALETLDKLRDLQEQLAALPEVPWEFDMDLFDQLVEKILPISNTELLFKLKCGLELKEVIPQ

SEQ ID NO: 7042 - protein, 571 aa, unidentified
  source 1..571: note = uncultivated organism
MAKSAPPMRCAIYTRKSSEEGLEQSFNSLHAQREACESFVLSQRHEGWSVIGTAYDDGGFSGGTMERPALKSLLTDIDAGKVDVVVVYKIDRLTRSLFGFAKIVETFDANKVSFVSVTQAFNTTTSMGRLTLNVLLSFAQFEREVTGERIRDKFAASKKRGMWMGGNVPLGYDIRDRKLVVNKSEAETVSAIFRLYVELGSVRKVKAEIDRLKLRTKVQTPKSTVTRGGLPFRVGHLYTILRNRLYRGEIQHKGEIYAGDHEATVEQDLWDTVQARLRANAAMRRSGKSSKEPSLLAGILDDGAGHRMTPTHAVKNGKRYRYYISSHLIAGAESGRRVSSGDGLRIPAQEIEGHVIAAIAAFLGDAPKVLAEFCREMPPSRASDVIRRAEQLGNELMATDRAEQYERVRSLIAGVQVKANSISVELKRSAMLGVIAIPSEGAALDRSATMALTMPCELRRLGKEKRLIVSAHEPKTRPDASLIKALVKAHEWFGMLRSRTVESITDLAKKENVQRTYPSRIIPLAFLAPDIVEAILDGRQPIELSLDRLLASMPLPLDWREQRAVLGFPAH

SEQ ID NO: 7043 - protein, 559 aa, unidentified
  source 1..559: note = uncultivated organism
MTTTESATDARGRTRVALYLRVSTGRQAEHDLSIPDQRRQALAFSEGKGWQVVSEYVEPGASATDDRRPEFQRMMDAAAARPPLFDVIVVHSFSRFFRDQFQLEFYVRRLAKNGVRLVSITQDLGEDPMSVMMRQIMALFDEYQSKENAKHTLRAMRENARQGYWNGSRPPLGYRVVEAEQRGTRTKKKLEIDPVRADQVRLIFRLARIGTEDTGPMGTRRIAGYLNDKGIRTPTGGRWGVGRIHEVLTRTTYIGVHRFNVYSWRKKQAKPEDEVIEVPVPPLIDKDEFDEVQRILRERSPQLKAPRFVSGPTLLGGICFCANCGGAMTLRTSGKKGNYRYYTCCTKARQGETGCSGRTVPMDLLNDLVVEHIEDRILVGKRLTGILSGLLERRSDEDHRVRERIAQLRRQASDADARLTRLYEAIADGIVDRTDENLKGRLAELKAIRDSARADVERSEANDKDRPIEITPDMVSRLAEDASRKLRKPNGTYSRHYVQSIAQRVEVRDDEVHIVVSQRLLLRALMAAGGVVLNRTNAEIRSFEPKWLPGPDSNQRPTG

SEQ ID NO: 7044 - protein, 525 aa, unidentified
  source 1..525: note = uncultivated organism
MTATSKLIRCAIYTRVSTDSGLDQEFNSLDAQYDAASAYIRSQAHAHWTLVRTRYDDGGFSGGSTDRPALQRLLDDVRTGKVQIIVVYKVDRLTRSLADFAKLVELFDAHGVSFVSVTQQFNTTTSMGRLTLNVLLSFAQFEREVTAERIRDKIAASKRKGLWVGGMVPLGYELKDGKLLIVEQEAELVRRIFRRYLELGSVNRLVIELGEQNVRSKLRKLANGTTRGGVPFTQGPLFYMLRNRFYLGEVAYKSEIHPGPQPALLERDLFEAVQQRLTEQRTHNVTARNKSGALLRGMLFDEAGHPMVPTHSTKQGVRYRYYVSEPYLRGHAKAPYGLTTRVPAAEIEAITLKALVNYPFNLSNPLEHLARVEIRKKAIAVWPKLSKSDQSDDDTGQQTDPIQIAWTKPPSKRFKEILVPDAAERRQARPIKFERRAALIKSISRGRVWLDEIVSGRATVEEIATRQKCSVRHVNMTVSMAFIAPGLVKAAVEGRLPRGIGVASLREPPAEWSLQYQRLGLTPAD

SEQ ID NO: 7045 - protein, 514 aa, unidentified
  source 1..514: note = uncultivated organism
MPQVKLISPITRQEIRKVRVAAYCRVSSNSADQQNSYTNQIRVYTSLIQRRKEWELVEIFADEGLSGMNAQNRTEFQRMIKMCEQHQIDLIVTKSVSRFARNAKESLEYVRKLKLLGVGVQFEKEGIYTLALGDEMLLNTFSAIAQEESKAISQNQRLSIVKRMQSGEYVDSNAPYGFRLVDKALVVYEPEEAAIVRMMFENYLSGQSTSEIARDLNSRGIKTKTGKSTWRSTKVAYILGNERYCGDCKYQKTYRDTTVPFKQFRNRGQEDMFYASMTHAPLIDRDTFDKVQLLLKKRQDVFGKSTTQNIYPLTSRIQCSECGSYFRRRQVSGAVKWGCSKHIQDRTQCSSNYYSEERIYDAFVAMVNKLRFSEYDIMGQTLLRLESAELKRKQKNTAARELSRNIADLNAKLVMVEQLHAKGYLKDEVHKAQVREINDQLRQLKRERQCEFSSGITHMIEELTRLKKLLEELEEPLDRFDEKLFTEIVQAISISRRDEMTVTLIGGLRFTEML

SEQ ID NO: 7046 - protein, 537 aa, unidentified
  source 1..537: note = uncultivated organism
MSRPAERNNPSIRQSVETHRTTVRCAIYTRKSTDEGLDQDFNSLDAQRESAEAYIASQRHEGWLCISERYDDGGFTGGNMERPALKRLFADVESGGIDCVVVYKVDRLSRSLLDFARMMELFDKHAVSFVSVTQQFNTTSSMGRLTLNILLSFAQFEREIISERTRDKMSAARKKGKWVGGMPVLGYDVDRKGGRLIVNEDEALKVRGIYDLYLEHKALIPVVQELERRKWGAKQWTTQRGDVRGGNLFNKSSLFRLLTNVVYTGNVCYKGTIYRGEHEGIVDPDLWQRVQDTLRHNGRSGGKDIRNKYGALLRGLLYCAPCGTAMVHTYTAKNGRHYRYYVCLTAQQRGWTACPTKSLNAHEIETAVVDYIRGLGSSTEVFSKTASEVRAQSQKRLTELETERRAHERELKRLDVRLRALVAESPTSSTDRRLVTDQMADLQDQIRSLEQRMTAIREETVAIQKETLDEGDLEKALTAFDPIWESLAPREQARIIKTLVERVAYDGRDGKVTVTFRSPGIKAMCMGDGTRGVEERT

SEQ ID NO: 7047 - protein, 568 aa, unidentified
  source 1..568: note = uncultivated organism
MEDFRKVAIYSRKSKFTGKGESIENQIELCRKCIQGTFENIPDDDILIFEDEGFSGGNTNRPQFQKMLKLCREKQIKCIVCYRLDRISRNVSDYSNLITELNKLDISFISVTEKFDTTSNMGRAMMYIASVFAQLERETIAERIRDNMLELAKDGRWLGGNPPTGYKSVETIGSVTIDGRKRKARKLEIIPEEAEIIKLVFSKFLEYRSLTKTETYLIQNDYVTKTGKSFSRFAIKAILTNPVYVIADETAWNYFDLKEIDIFAEKDSFDGTHGIMAYNKTSQQVGRSNEIRDMKEWIIAVGRHQGIISGEDWVQVQKLLEQNKSKSYRKPRSNVALLSGLLYCADCGSFMRPKLSQRRNKDGELIYDYLCELKEKSKGQKCDIKRALGNEADRLVCEEIKKLTADESEFMKMLKKEQKCLNINDFSCQDNLKKLRKSKSDTEAKIKNLLQTLARTENSSAQDYILNEINELDKKIKSFESQIKEYEDLANTGNISDTEFESLADMLCSFADSFETMNIEQKRLAIRAFIKRIVWDGERIHIYFFGCEEGEIDLSDDEFSEPQRKGCK

SEQ ID NO: 7048 - protein, 543 aa, unidentified
  source 1..543: note = uncultivated organism
MARRNNLQLAQQPAPSVRCAVYTRKSTTEGLDMDFNTLDAQREACEAYIKSQMHEGWVALPEMYDDGGFTGGNMDRPAFKRLMAEVEAGRVDCVVVYKVDRLSRSLMDFTKIMGKFEANNVSFVSITQQFNTATSMGRLMMNVLLSFAQFERELVSERTRDKIAASRKKGKWAGGSPVLGYDIDHLTHRLGVNAEESVQVHEIFELYLRKQTLRETAEELNQRGWKTKTWTTKGGKLNPGQPFDKNKLHRLLTNVAYIGKVPHKEEVYEGEHDAIVDDGLWGKVQHLLEFNGRTKGSRQKNKHGALLMGLVRCASCDCPMTHTFTNKKNKQYRYYTCTNAHNKGWKACATKCISAPQIENAVVEQIKEFSKAPEMIEKTIRAVNEQYKSKLPLLLSEKKRLQNDTIHLQAEAKRLVAAISSGSGESGRIVSERLAEIEKEIESMNQRLAAVKDEMIKIDLQTVDQADVKKALAMFDPIWDVLYPKEQARIMHLLVEKVIYDGAQGTIAITFRPMGMKSLASEFEQTKNESGGKHGIEQSAVNE

SEQ ID NO: 7049 - protein, 581 aa, unidentified
  source 1..581: note = uncultivated organism
MADSEKTQRRSAKKLRCAIYTRKSTDEGLEQAFNSLDAQREACVAFIQSQKHEGWTVSPALYDDGGFSGGTLERPGLKRLLADIEAGQIDVIVVYKVDRLTRALSDFAKLVEIFDRRGVSFVSITQQFNTTTSMGRLTLNVLLSFAQFEREVIGERVRDKIAASKKKGMWMGGMPALGYDVRDRKLVIDHDEARTVVDIYRRYLALKSVHALKDELAEAGIKSKRRVRSDGTEYGGQKLSRGALYLMLQNRIYRGEITHKGNSYPGEHPAIIEQPLWDEVQAVLARNRIERATGVRAKHPSLLAGLVFDESGERLTPTYAVKKGTRYRYYVSTALLTGAGRNRSSGRRIPAGNLEGLVIDRLRAFLADPAAVLDAVDNESHSGSGQSQLIERGRQIAEELGAQAPNEVRTTLMTLLCRVAVKPDRIEIDLSRRRLSELLGGQPIDLTMQDQRLDRKSDDVVTLVASARLKRVGREMRMLVENSDDHAAADPSLLRIIARAHDIQARLIQNTKLTVHDIAREEHVSAAYIYNLLRLPWLAPDITTAIVNGRQPQQLSAKTLMRQASQLPTDWVEQRTQLGFR

SEQ ID NO: 7050 - protein, 542 aa, unidentified
  source 1..542: note = uncultivated organism
MTKATTRPQIRAALYTRKSSEEGLDQSFNSLDAQREACAAYVKSQASEGWRALTDHFDDGGVSGGTMDRPALKRLLAAIEAGRIDVVVVYKIDRLTRSLTDFARMVDIFDRHNVSFVSVTQAFNTTTSMGRLTLNVLLSFAQFEREVTGERIRDKIAASKAKGMWMGGVLPLGYDRPADGTRALKVNPVEAEQVRRIFSAYLRLGSVHALEQALLAEGVRSKPRQGSDGTMSDGHPLSRGALFQLLRNPLYIGQIRHKGVLHPGRHDAIVDRGLFDAVQAHLTDQARRKARGSTPEGSGEASATGSALTGRIFDAEGHRMSPTFATGRGGRRYRYYVSAPLQQGRKLAGPAPRRVPAALLEATIATRLRAIKGVDPAAPFDSLVSVTVRTGALDLVLPDHLRDPLAAHILDEERLEDASGADRRSSPGVRLTIPFAVFRRGSPLPVVPGPTRGPVPDPVLIRALRQAHALLDRDATGRPILHAAPRSPYAQKLVRLAFLAPSLQTAILEGRQPQGLTLTHLLAAEIPLDWAAQRAKFGIAAA

SEQ ID NO: 7051 - protein, 583 aa, unidentified
  source 1..583: note = uncultivated organism
MSAMHKKATTNRAKASTRCAVYTRKSPEEGLEQDFNSLDAQREACEAFILSQKHEGWTALPEMYDDGGISGATLERPALKRLLADIETGRIDTVVVYKVDRLTRTLGDFAKIVEVFDARGVSFVSVTQQFNTTTSMGRLTLNMLLSFAQFEREVTGERIRDKIAASKKKGMWMGGLPPLGYDAADRKLVVNRHEAETVRHIYRRYAALGSVRALKDELDRDGVVSKVRVDRFGRTTGGKPLARGALYLLLQNRIYLGEIVHKETSYPGKHAAIIDEALWNQVQQRLAANRVDRQSGANAAEPSLLAGLIYDDVGERMTPTHANKKGRRYRYYVSQSLIKRGRPKRSDAGRRVPAGDVEQLVVDRITGLLSDEAAVFDAIESFVEDINERRSIVTQAADLVGRWPDLEPPEKRRIFQSLVARIEVRRESVKIRVRPGRIPEVVIADSEMMRIDQAPADVEPTLDLNVSAKLKRAGMEIKLLIDGAGGRSRGTPDRSMLRLLAQAHRYREMMLEAQGRTMSDLARQAGVGRSYFSRIVRLGFLAPDVVKAVLHDRHPPELTAKQLSLRTKLPSVWQDHISVLGIT

SEQ ID NO: 7052 - protein, 510 aa, unidentified
  source 1..510: note = uncultivated organism
MKMYNNVCIYMRLSKEDGDKIESESITNQRNLLNRYAEDIGIQIKKEYIDDGYSGTNFNRPAFKEMLEDIKNKRINTIIVKDLSRFARESINASEYIEKIFPKYNIRFIAVLDNVDTYLEKLANELIEFKLYNNQKFAKDVSEKMKKSKRANMEKGLYMGTFPPYGYVKDPDNKGKLLIDKKSSKIVKKIYDMYLSGKSSVCIAKYLTSKNIKTPAEYYNNIVQYKNHNTYNVWKHTQVNRILKNQVYIGNVVRNVVNKRTYKAKGKRHTNKEEWIITENMHEPIIDKETFYEVQEIIKSKKGSNRKLKYNYLLRPYLYCAKCGRKVVFNTRSEKQVDIACPKSNIKCCDRFYYNYYKLEKIILDNIREYYNKLFDFSEAEDRILLKRKEQNIISIEDRIKKLTYTYNRLNDNLDCMYLEKLDDKITQEEYLKNTEELKKKREQIQKELKECKTIKENFNNEDIIELKNILSNKNNEMKNNITRELIDKLIYKIEVSKNEIKVHYKFKFF

SEQ ID NO: 7053 - protein, 563 aa, unidentified
  source 1..563: note = uncultivated organism
MSNKIKKIYHAAIYVRLSKEDGDIANSSKVESDSISNQKDLIKDFLKDKKDIKVVSERVDDGFSGSNFERPAFQLMLEDIKKGIVDCVIVKDLSRFGREYIDAGRYIEKIFPSLGVRFISINDNYDSAGEKSQSDEIIIPFKNLINDAYCRDISIKIRSQLEIKRKNGEYISAFVPYGYMKAEDDRHKIVPDTYSAEVVKDIFKMKLHGMSQDAIANKLNDSGILSPMEYKKSLGSNYQTSFKINEQALWSSVTVRRVLGNEVYIGNLVQGKQSTPNHKVKQTFVKPEEEWIRIEKNHEAIITDRDFEIVQRLLGMDTRTAPDQDGVYVLAGIAVCADCGTPMARKVSTVCGKKYAYYICSNHKETKDCSSHRIPVKDLENGVLELLRQHVYNVLDLTKVMDFIGKVPFQKLDIKRLEERLDKKEAEIVRCKALKVMLYEDMKEGIVSKKDYSELYAAYETKCRDAEENVRKIRLEIEKIVNSEDDKHKWIEYFTQYKDIQELSRIVVVELISEIRVFDKHNIEIVFDFDDCYRELLNQFETIEIKDNTEISRTMELVGREAV

SEQ ID NO: 7054 - protein, 524 aa, unidentified
  source 1..524: note = uncultivated organism
MKRCACYTRKSIFSDKSESTKNQARMCKDYIDCHYSEQITYNVYEDEGKTGANTDRPELHRLIDDIQNDTVDILIVYQLDRLSRDIKDFSNIYAKLEEHHVQFVSIKENIDTSTPIGKAMMYIAVVFAQMERETIADRVYDNMIGLSGSGWWVGGNPPVGYKRKRITTPDGKNHVTIEPIPDQAKYVKLIHKTFQENNFSLTGFQTYLKSKNILTLNGNFFSSSQIYKILTIPYCVQATQKVYDYFAAKGCIMNPQCPRELWDGKHGVMVYGRSTERNHKHELNPPEKWRVCIGQHDAFLDDETWLRTQEKFRKNLFDKKMKYDTPLLKGILRCKCGTLMAVSRKKKNVGISSYYHCVKRMRQGTEYCDMSQINTNLLDNKVLDIFREIEIDNSMINKYASSAKKVDYTMKKKLISKRIHQESEKIHNLAGTLSEYKKSSAAKYIIEEINEHDVILNQLNRDLLDIQIAERTQEKEQGTLAEKIIMISDFMRNVNTLTAEEKNALAKKCIKGCTWDGTKLFITF

SEQ ID NO: 7055 - protein, 551 aa, unidentified
  source 1..551: note = uncultivated organism
MENTTVIQYNAAMYVRLSKEDEISAKGAKAESNSISNQKRLILDFVKEHADINIVSIREDDGYTGTDFDRPDFQRMLDDIRAGIINCVIVKDLSRFGREYINAGKYIDRLFPFYGVRLIAINDHVDTITRSASDDFNITLKNLMNDNYCRDISIKIRSNLQVKRKNGEFICAFAPYGYVKSEKDKNLLVPDPYAAGVVQDIFRWKLEGMSQDTIARKLISDGVLSPLEYKKSKGERLSTKFKTSKQAQWTPVAVRRILTNPAYIGTLVQGIRTRPNYKIKTVVVNEKQEWVIVENAHEAIISSRTFALVQRLLELDTRTSPYEERVFPLSGLLICGDCGGPMARKTTTSGGKKFFYYICGTHKKEKNCSNHQISEKLLETVVLSVLQEHIRTVTELEKCLEIIKEAPLRKISLKKAEDRMTVIEAELDRYRRLKTSAYEDMRDGILSKEDYLDIRGQYDERIAAALTAQNQIRKEIDLFLADSTSPQQQWIQEFVKYRNLQELNRCVAVECIECIRIYEDKRVEVEFSHARNFQVLSEHVHEFFEQRKEVV

SEQ ID NO: 7056 - protein, 564 aa, unidentified
  source 1..564: note = uncultivated organism
MTKPRIRCAIYTRKSSDEGLDQDFNSLDAQREACAAYIASQRHEGWVPDKTRYDDGGISGGTLVRPAMQRLLADIDAGRIQMIVVYKIDRLTRSLADFAKLVERFDAAGCSFVSVTQAFNTASSMGRLTLNVLLSFAQFEREVTAERIRDKIAASKKKGLWMGGVPPLGYDPHPDPKTRGLVVSQNEAKIVAAIFHLYVQLGCLNAVMRKTIEVGLRSKRHHFKSGRTQGGNSFSRGQIYALLRNPIYIGKIRHKANLWDGQHEAIIDIELWDRVQARLQEASARPRSQVGSVSSPSKVGVAPLTGKLRDETGDRLTPTHTKRRGRRLRYYVSNRLISGGTDPGGWRLPAVALEKAVADLIAQHLSDLASGHQICSMPDLQIGDAVRSKAEDLAQRLSKGAPGLLANITAGGQLAKGRIVLELNAAALADELCLKPDEIDPSALQIQAPFELRRRGVEGKIVAGDPEPAPDRTMLRALARAHIWTADLRRGKSLSDIAAATSHSESYGRTRAQLAFFSPKIQNAILVGSQPPELTLEKIIRKPIPLDWDMQARIYGFSQDLNYP

SEQ ID NO: 7057 - protein, 563 aa, unidentified
  source 1..563: note = uncultivated organism
MTPAPPIQAISQKRVGIWIRVSSEEQAEGDSPEHHRLRAAHYCEAKNWRVAEVYDLAGVSGRSVADHPECKRMRADIKRGHIQALVFTKLARLTRNVRELMEFSDFFQQNGADLVSLSENVDTSSPAGRLFFNLVGCMAQWEREEITDRIRSSIAIRTKLGKPISGKVPFGYQWKDKKLVVHKENAAVRRLIYELFGEHQRIKTVARILNERGYRSPTGGMWSDTSIRWQLKESSAKGIYKRNYTRNAATNNGQRFKSEGEFVFVPVEPIVTPELWQRCNALLEARYMSRSKPSKKPAHLFSGLVVCGGCGGKMYVSTKSPNYSCRRCSTRISGLDLEQVFLDQLRGYLVQPANIERYLTKQAQALAETEALLASRRQAGAKAAAETKKILQLYLENKITTEDFGQMNQPFAEQAEQTKKEIPELEAQVDALKIETCSSEQIATEATDLFKRWTKMTLAERRQIAELIVKVVTVGNDHTLNLELYHLPSYKELSKWQSTSTRARSRDLDCGLRRSGGRGFRCRGGETGGVGVEGGARGGGLRRGRRGAALCIPTCRVGFAPHP

SEQ ID NO: 7058 - protein, 639 aa, unidentified
  source 1..639: note = uncultivated organism
MEKILAGYIRVSTEMQTERDSLINQEEILTGYARARGKEVKIYKDAGISAKDKERPAFQEMLSDARQGLIEAVVVTKLDRITRSLTDLLFLKEFFEEHGIAFISVGQNLDTSTPMGRFSFYVLGLVAQLEREMTAERVAEDMKNRARRKKWNGGVVPFGFTSQMRHYREWIKGKAKEQMKESGGQPLKKVMQSLEQDPVIRQEAMEHARRIMPEPKTLAIDPSEAEVVKTIFQLYQKHKTFRGVVHRLNSRGIKTRDGEPWASTSIRRILQNHFYFGALTYNKRKSHGKTSRVRPEEEHIIVEDVFEPIISKDEFLAVQSLIADQKKIPSASKASPYLLTGLLECQYCGTKMYGYTYQDYRRKGTRLYQYYRCNGHISKGAAVCPGNTVSASLVEGLITEELKSLSTNPKELGEKAADFKIKFDEEIKPLLDRQKEIRQLLDQVDKKFKRLLGLYEEELIEKKDFLAEKTSLDAQRRFLNEEMEEIGQRLVSNDLAGFDLENTLSSIHNLAEVFDELDLEERKELLRIVVNKVEVGKHHLDCQIFALPKSFVAYDRTVNRSSPNYKNLPQPSLITLRISKYPSGTLGEIIRKWRLEQGLFQKDLAKMLGVDEMSIVNWETGKRVPTKVNRERLKKIMGE

SEQ ID NO: 7059 - protein, 527 aa, unidentified
  source 1..527: note = uncultivated organism
MARTRRPCLSDSKQCRSWRTALYTRLSREDGDKLESDSIVNQRALLEAVLARQPELKFAGLYVDDGYTGTNFERPEFLRMLTEIEAGRVDCVIVKDLSRFGRDYIDVGRYLERIFPQYGVRFIAVNDNIDSEKGPYDMLLPVKNVFNEQYARDISRKVRSAFQTKQQAGAFVGAFPSYGYQKDPIDHNRLIVDPCAAPVVQRVFTLFESGVGKITIAKLLNKEGIPCPSEYKRLRGERYHNGRRMDRTTYWTYTTIHRMLQNQMYAGNMEQGKAPRQSLHGKAKSLDKSQWAVVKGTHEPIIGASQWERVQSLLQKDTRSMDFQQNVSPFAGFLRCGDCGRAMSKSNHRSGVSYCCGSYKRYGPSVCSRHGITQAELEEILLCDLNQVISAVGGLEDLAKVADDKGGRQEKSKEKAALHGAQQRLYRLKKAAYEDYREGLLGREDYLRYKEDYERQEQKLGAQLACLKEAQEAGLGEKPWVASLLREGRLLALDRSTLAETVKEILIFEDRIEITYTFSDDLGLFPA

SEQ ID NO: 7060 - protein, 609 aa, unidentified
  source 1..609: note = uncultivated organism
MRENEDAIAIYSRKSRFTGKGESIGNQVELTKEYIRVHFGDDAVKKTIIYEDEGFSGGNLNRPAFQRMLEAAQQRKFRAIVVYRLDRISRNVSDFSGLIEELARLNISFVSIKEQFDTSTPMGRAMMYIASVFSQLERETIAERIRDNMQELAKTGRWLGGVTPTGFASEAVKSITVDGKTKKACKLKLIPEEAEIIQTIYRLYLETDSLTLTEATLIKQGFQTKNGKRFSRFSVKSILQNPVYMTADQAAYDYFVEKDADLFSEREAFDGVHGIMAYNRTDQEKGRATIMLPTSQWIVSVGKHPGLIPGKDWVKIQESLERNKSKSFRKPRSNEALLTGLLFCRCGARMYPKLSKRKTADGKPIYTYVCKMKERSQRSVCNNKNANGNTLDMAIIEQMKTLQDDHSSFIDQLEASRKFYTGNRADYEERLAAMQKEKAGIEKKINTLVDSLTEVGEGAAKAHVARRIEQLNQEYEALGQRIQELEGLTSEHALSDIEFDVLRQLLQVFREDIDHMSIEQKRAAIRTVIRKVVWDGVNAHVVLFGVQDEEIAYPEIIAAGAASCDDGEETEELVPFWDVAYEQSQEEGDSPEKPAFGGMAETPWGTDSK

SEQ ID NO: 7061 - DNA, 325 bp, unidentified
  source 1..325: mol_type = unassigned DNA; note = uncultivated organism
cgcttcaaggcgacggagggactgattaccaacttccatttaccgcaatcgacgctgcttatgcttgtttcggcgttcagctcacgggagataatgatgaacgcatatgagacggcgaagagagaacaatatcgatttttcagtttcggagatgcgatgtttatgcgatagcatcaaaaaacgggcgctttttataagctgcccgtttttctgttatttgttatttgaattatttcagctgaaagcctgttcaattccccagtcgcagaggaataggatgggataggtatagcaaaggtgaaagaggctggtgttccattttacg

SEQ ID NO: 7062 - DNA, 325 bp, unidentified
  source 1..325: mol_type = unassigned DNA; note = uncultivated organism
gaaagacgaggaaacgtccgataaataaaaaaacgccttaaaaggcgtcacaggcggtttgtgaggaagcaagtcaacagagataaggacttgcgtaatttataagcgccatttctgggcgagtaatgatgatatcccgtgagcatcggggatgcgatgtttatgcgatagcatcatttgttacggaataataacgacaagaaaagcccagaacacgcttggtttctgggctttttgttgttcaatcgtctttgtacataaattcgtggattatgccgtttttgaaggtaattgaccggattttaccgttttctatacaaaagtt

SEQ ID NO: 7063 - DNA, 325 bp, unidentified
  source 1..325: mol_type = unassigned DNA; note = uncultivated organism
cgcttcaaggcgacggagggactgattaccaacttccatttaccgcaatcgacgctgcttatgcttgtttcggcgttcagctcacgggagataatgatgaacgcatatgagacggcgaagagagaacaatatcgatttttcagtttcggagatgcgatgtttatgcgatagcatcatttgttacggaataataacgacaagaaaagcccagaacacgcttggtttctgggctttttgttgttcaatcgtctttgtacataaattcgtggattatgccgtttttgaaggtaattgaccggattttaccgttttctatacaaaagtt

SEQ ID NO: 7064 - DNA, 325 bp, unidentified
  source 1..325: mol_type = unassigned DNA; note = uncultivated organism
gaaagacgaggaaacgtccgataaataaaaaaacgccttaaaaggcgtcacaggcggtttgtgaggaagcaagtcaacagagataaggacttgcgtaatttataagcgccatttctgggcgagtaatgatgatatcccgtgagcatcggggatgcgatgtttatgcgatagcatcaaaaaacgggcgctttttataagctgcccgtttttctgttatttgttatttgaattatttcagctgaaagcctgttcaattccccagtcgcagaggaataggatgggataggtatagcaaaggtgaaagaggctggtgttccattttacg

SEQ ID NO: 7065 - DNA, 312 bp, unidentified
  source 1..312: mol_type = unassigned DNA; note = uncultivated organism
taccgttttaaggtattggatgccctgattacgaatttccacctgccccagtccacactggtgatgctggtcagcgcgctggccggacgggagcatattttaaacgcctaccgggaagcagtgaaggaacgttaccgtttcttctcctttggggatgctatgtttatcgcggcccatccggctgctgagaagcggcagggattgtgggaatgacagaagaaagcgggagaaaatggaagaacgtttaaataaatggctgagccggatgggagtctgctccagacgcgaggcggaccgtctgattgaggccgg

SEQ ID NO: 7066 - DNA, 312 bp, unidentified
  source 1..312: mol_type = unassigned DNA; note = uncultivated organism
gttggagttcctgggcttttctgcatgtagaagaagttcgttgcctgccggatgatttggtgatataatgcagtgtatatgaaaaaaatgaaagaagtggaaagaatgataaaccgtacagttaattttaggtgcagacccgtgagtatgggggatgctatgcttatactataacaccaaaaataaactgtacagttgacactaaaaaagcagccaggaggtcaattctcctggccgttttgattataagtctgaaaaatcgcactcacagccaattagctgttcatggcatacggggcaacgctccgcatc

SEQ ID NO: 7067 - DNA, 312 bp, unidentified
  source 1..312: mol_type = unassigned DNA; note = uncultivated organism
taccgttttaaggtattggatgccctgattacgaatttccacctgccccagtccacactggtgatgctggtcagcgcgctggccggacgggagcatattttaaacgcctaccgggaagcagtgaaggaacgttaccgtttcttctcctttggggatgctatgcttatactataacaccaaaaataaactgtacagttgacactaaaaaagcagccaggaggtcaattctcctggccgttttgattataagtctgaaaaatcgcactcacagccaattagctgttcatggcatacggggcaacgctccgcatc

SEQ ID NO: 7068 - DNA, 312 bp, unidentified
  source 1..312: mol_type = unassigned DNA; note = uncultivated organism
gttggagttcctgggcttttctgcatgtagaagaagttcgttgcctgccggatgatttggtgatataatgcagtgtatatgaaaaaaatgaaagaagtggaaagaatgataaaccgtacagttaattttaggtgcagacccgtgagtatgggggatgctatgtttatcgcggcccatccggctgctgagaagcggcagggattgtgggaatgacagaagaaagcgggagaaaatggaagaacgtttaaataaatggctgagccggatgggagtctgctccagacgcgaggcggaccgtctgattgaggccgg

SEQ ID NO: 7069 - DNA, 312 bp, unidentified; identical to SEQ ID NO: 1
  source 1..312: mol_type = unassigned DNA; note = uncultivated organism

SEQ ID NO: 7070 - DNA, 312 bp, unidentified; identical to SEQ ID NO: 2
  source 1..312: mol_type = unassigned DNA; note = uncultivated organism

SEQ ID NO: 7071 - DNA, 312 bp, unidentified; identical to SEQ ID NO: 3
  source 1..312: mol_type = unassigned DNA; note = uncultivated organism

SEQ ID NO: 7072 - DNA, 312 bp, unidentified; identical to SEQ ID NO: 4
  source 1..312: mol_type = unassigned DNA; note = uncultivated organism

SEQ ID NO: 7073 - DNA, 317 bp, unidentified
  source 1..317: mol_type = unassigned DNA; note = uncultivated organism
taccgcttcaaggtgctggatgccctggtcaccaatttccacctgccccagtccaccctgatcatgctggtgtccgccctggccgggcgggagcacgttctggccgcctatgaggaggctgtgaaggagcgctaccgctttttcagcttcggagatgccatgttcatctcctgattccaaatcataaaatacgcagagatccgacggatctcgtcaaaggagtttttttgtgtttgaagtgatcaagaccgaggggaacgcccgccggggcgtatttacctgcccccacggcactgtccagacccctgtctttatga

SEQ ID NO: 7074 - DNA, 317 bp, unidentified
  source 1..317: mol_type = unassigned DNA; note = uncultivated organism
ggtagcgacgattgccaggacagctatgccaagtatctcaccaacgtctgcaagtacgatgaaaagtacgcaaagagcatggcggatctgcaattccgaagttgctcgaaaagtgttaccaatgcggaaatctggtctcccgtgagtatgggagatgccatgttcattggagactagatacagaaatttccagaggactgagaaaaagcccaggaaccaaggggttcctgggctttttgctgtcataggtcgttgtagaaaaattggagctctatgccgtttttgaagcggattgagacgactcggccgttttttat

SEQ ID NO: 7075 - DNA, 317 bp, unidentified
  source 1..317: mol_type = unassigned DNA; note = uncultivated organism
taccgcttcaaggtgctggatgccctggtcaccaatttccacctgccccagtccaccctgatcatgctggtgtccgccctggccgggcgggagcacgttctggccgcctatgaggaggctgtgaaggagcgctaccgctttttcagcttcggagatgcgatgttcattggagactagatacagaaatttccagaggactgagaaaaagcccaggaaccaaggggttcctgggctttttgctgtcataggtcgttgtagaaaaattggagctctatgccgtttttgaagcggattgagacgactcggccgttttttat

SEQ ID NO: 7076 - DNA, 317 bp, unidentified
  source 1..317: mol_type = unassigned DNA; note = uncultivated organism
ggtagcgacgattgccaggacagctatgccaagtatctcaccaacgtctgcaagtacgatgaaaagtacgcaaagagcatggcggatctgcaattccgaagttgctcgaaaagtgttaccaatgcggaaatctggtctcccgtgagtatgggagatgccatgttcatctcctgattccaaatcataaaatacgcagagatccgacggatctcgtcaaaggagtttttttgtgtttgaagtgatcaagaccgaggggaacgcccgccggggcgtatttacctgcccccacggcactgtccagacccctgtctttatga

SEQ ID NO: 7077 - DNA, 317 bp, unidentified
  source 1..317: mol_type = unassigned DNA; note = uncultivated organism
taccgcttcaaggtgctggatgccctggtcaccaatttccacctgccccagtccaccctgatcatgctggtgtccgccctggccgggcgggagcacgttctggccgcctatgaggaggctgtgaaggagcgctaccgctttttcagcttcggagatgcgatgttcatctcctgattccaaatcataaaatacgcagagatccgacggatctcgtcaaaggagtttttttgtgtttgaagtgatcaagaccgaggggaacgcccgccggggcgtatttacctgcccccacggcactgtccagacccctgtctttatga

SEQ ID NO: 7078 - DNA, 317 bp, unidentified
  source 1..317: mol_type = unassigned DNA; note = uncultivated organism
ggtagcgacgattgccaggacagctatgccaagtatctcaccaacgtctgcaagtacgatgaaaagtacgcaaagagcatggcggatctgcaattccgaagttgctcgaaaagtgttaccaatgcggaaatctggtctcccgtgagtatgggagatgcgatgttcattggagactagatacagaaatttccagaggactgagaaaaagcccaggaaccaaggggttcctgggctttttgctgtcataggtcgttgtagaaaaattggagctctatgccgtttttgaagcggattgagacgactcggccgttttttat

SEQ ID NO: 7079-7080 - skipped (2 entries)

SEQ ID NO: 7081 - DNA, 338 bp, unidentified
  source 1..338: mol_type = unassigned DNA; note = uncultivated organism
aagtccacgttgatcatgctcatcagcgccttcgccggccgcaatttcgtgctgaacgcctacaagaccgccgtcgagatgaagtaccgctttttctcgtttggcgatgcaatgttctgctcacgcaagcaaccagacgccgagcgagccgaagaactcaaggagcttgaggagctcgaccgccagcgcgaggccgagggaaaagcataatctacgttatgatagcgaaagagccgcatgtcatcggaacatgcggctcttttttgtatgatgttgatttgtcttatttccgctgcaggcgcttccagccgaggtagaggtggctggcgaagaagaag

SEQ ID NO: 7082 - DNA, 338 bp, unidentified
  source 1..338: mol_type = unassigned DNA; note = uncultivated organism
gcagcgggatcctcagcatggtgcagggcaagaccggtaaggcggcaacggagtaatgctatataatagtagacagtggcttgcttaactcaatgatacattggggacgccatgttcattcgccgcaagcagcccgatgcggagcgcgcggaagaactcaaggagcttgaggagctcgaccgccagcgtgaggccgaggccgcgaaaaaagaatgatgtgacagtaaaagccttccctgcgcgggaaggcttttttcaatggtagaggaaagtgtggatttcgtcattggcgaaggtgatctgggtgacgcggccatcgagcacgatgatttgcttga

SEQ ID NO: 7083 - DNA, 338 bp, unidentified
  source 1..338: mol_type = unassigned DNA; note = uncultivated organism
aagtccacgttgatcatgctcatcagcgccttcgccggccgcaatttcgtgctgaacgcctacaagaccgccgtcgagatgaagtaccgctttttctcgtttggcgatgcaatgttctgctcacgcaagcaaccagacgccgagcgagccgaagaactcaaggagcttgaggagctcgaccgccagcgtgaggccgaggccgcgaaaaaagaatgatgtgacagtaaaagccttccctgcgcgggaaggcttttttcaatggtagaggaaagtgtggatttcgtcattggcgaaggtgatctgggtgacgcggccatcgagcacgatgatttgcttga

SEQ ID NO: 7084 - DNA, 338 bp, unidentified
  source 1..338: mol_type = unassigned DNA; note = uncultivated organism
gcagcgggatcctcagcatggtgcagggcaagaccggtaaggcggcaacggagtaatgctatataatagtagacagtggcttgcttaactcaatgatacattggggacgccatgttcattcgccgcaagcagcccgatgcggagcgcgcggaagaactcaaggagcttgaggagctcgaccgccagcgcgaggccgagggaaaagcataatctacgttatgatagcgaaagagccgcatgtcatcggaacatgcggctcttttttgtatgatgttgatttgtcttatttccgctgcaggcgcttccagccgaggtagaggtggctggcgaagaagaag

SEQ ID NO: 7085 - DNA, 315 bp, unidentified
  source 1..315: mol_type = unassigned DNA; note = uncultivated organism
tctttggctattccaactttgcattgtcctttttgttgtccataatatgtttgatttgctagagcctctaaattctctaactttcaatgttccattcgtattatatggcataggctctgcttcgcctctataatatgtttccattctatctgtatcattattaaaactaatatttttgccaagaaaaatccccctcatataataattttattttattatatgaaagggaatatctatttgtgactatatttttacctttattttacttctttacatcttacaattactcttaatttactatcatctgtacatgta

SEQ ID NO: 7086 - DNA, 316 bp, unidentified
  source 1..316: mol_type = unassigned DNA; note = uncultivated organism
gaatacgttaaaaacattaatgaaaaaatcaatactaaagactttgaacaattaaaattactttgtcacacaattatagataaaatagttataaccgataaaaatatagatatacactacaagatttagtgtatgtctttttgaatttaatgtatcattattaaaatcaaaatggcatactatttgttgtaataattaaaacattcaatcatgccttttctatatacttttaagaatgtttttgaaaacattcttactaaaattttttctttaaaacttaatccatttaatgcactatttaacacaatatcttttg

SEQ ID NO: 7087 - DNA, 316 bp, unidentified
  source 1..316: mol_type = unassigned DNA; note = uncultivated organism
tctttggctattccaactttgcattgtcctttttgttgtccataatatgtttgatttgctagagcctctaaattctctaactttcaatgttccattcgtattatatggcataggctctgcttcgcctctataatatgtttccattctatctgtatcattattaaaatcaaaatggcatactatttgttgtaataattaaaacattcaatcatgccttttctatatacttttaagaatgtttttgaaaacattcttactaaaattttttctttaaaacttaatccatttaatgcactatttaacacaatatcttttg

SEQ ID NO: 7088 - DNA, 316 bp, unidentified
  source 1..316: mol_type = unassigned DNA; note = uncultivated organism
gaatacgttaaaaacattaatgaaaaaatcaatactaaagactttgaacaattaaaattactttgtcacacaattatagataaaatagttataaccgataaaaatatagatatacactacaagatttagtgtatgtctttttgaatttaatgtatcattattaaaaactaatatttttgccaagaaaaatccccctcatataataattttattttattatatgaaagggaatatctatttgtgactatatttttacctttattttacttctttacatcttacaattactcttaatttactatcatctgtacatgta

SEQ ID NO: 7089 - DNA, 309 bp, unidentified
  source 1..309: mol_type = unassigned DNA; note = uncultivated organism
ccttattaaccatttgaaaaatataaatattgataaaaaatagttcggatatttcaaaaaaataatgtttttcaaaaaacgaacatccgaactcatctaacctattgatttataaaagaaaaacagctcccgtgataggagctgttaactatggtgggccctgcctgactcgaacaggcgaccagaccgttatgagcggcctgctctaaccaactgagctaagggcccggcatctgaaaacggttaaaaaataggtcaaatattttccgaagtcaagcgctttttgggcaccccgccgatccgcgccgc

SEQ ID NO: 7090 - DNA, 309 bp, unidentified
  source 1..309: mol_type = unassigned DNA; note = uncultivated organism
agtatctattttgccctgatatcagaaaaaaacgctaaaaaaaggatataaaaaaagagataacgctcagaccggctatcgcgaacaccgcggaaatactgccgttcagaggatacaaaaaaagcctcttaatttaagaggcttttgatgatggtgggcgatacgcatcacacaggcgaacgcacaaaaatgtatctaatatttttcaaattcaaggggatatttgtcattacacaagccgccaatatccattttatggtatggcttaagcattataaaaaaaggccaccttttattaaggtggtcgga

SEQ ID NO: 7091 - DNA, 309 bp, unidentified
  source 1..309: mol_type = unassigned DNA; note = uncultivated organism
ccttattaaccatttgaaaaatataaatattgataaaaaatagttcggatatttcaaaaaaataatgtttttcaaaaaacgaacatccgaactcatctaacctattgatttataaaagaaaaacagctcccgtgataggagctgttaactatggtgggcgatacgcatcacacaggcgaacgcacaaaaatgtatctaatatttttcaaattcaaggggatatttgtcattacacaagccgccaatatccattttatggtatggcttaagcattataaaaaaaggccaccttttattaaggtggtcgga

SEQ ID NO: 7092 - DNA, 309 bp, unidentified
  source 1..309: mol_type = unassigned DNA; note = uncultivated organism
agtatctattttgccctgatatcagaaaaaaacgctaaaaaaaggatataaaaaaagagataacgctcagaccggctatcgcgaacaccgcggaaatactgccgttcagaggatacaaaaaaagcctcttaatttaagaggcttttgatgatggtgggccctgcctgactcgaacaggcgaccagaccgttatgagcggcctgctctaaccaactgagctaagggcccggcatctgaaaacggttaaaaaataggtcaaatattttccgaagtcaagcgctttttgggcaccccgccgatccgcgccgc

SEQ ID NO: 7093 - DNA, 312 bp, unidentified; identical to SEQ ID NO: 5
  source 1..312: mol_type = unassigned DNA; note = uncultivated organism

SEQ ID NO: 7094 - DNA, 312 bp, unidentified; identical to SEQ ID NO: 6
  source 1..312: mol_type = unassigned DNA; note = uncultivated organism

SEQ ID NO: 7095 - DNA, 312 bp, unidentified; identical to SEQ ID NO: 7
  source 1..312: mol_type = unassigned DNA; note = uncultivated organism

SEQ ID NO: 7096 - DNA, 312 bp, unidentified; identical to SEQ ID NO: 8
  source 1..312: mol_type = unassigned DNA; note = uncultivated organism

SEQ ID NO: 7097 - DNA, 308 bp, unidentified; identical to SEQ ID NO: 9
  source 1..308: mol_type = unassigned DNA; note = uncultivated organism

SEQ ID NO: 7098 - DNA, 308 bp, unidentified; identical to SEQ ID NO: 10
  source 1..308: mol_type = unassigned DNA; note = uncultivated organism

SEQ ID NO: 7099 - DNA, 308 bp, unidentified; identical to SEQ ID NO: 11
  source 1..308: mol_type = unassigned DNA; note = uncultivated organism

SEQ ID NO: 7100 - DNA, 308 bp, unidentified; identical to SEQ ID NO: 12
  source 1..308: mol_type = unassigned DNA; note = uncultivated organism

SEQ ID NO: 7101 - DNA, 308 bp, unidentified; identical to SEQ ID NO: 13
  source 1..308: mol_type = unassigned DNA; note = uncultivated organism

SEQ ID NO: 7102 - DNA, 308 bp, unidentified; identical to SEQ ID NO: 14
  source 1..308: mol_type = unassigned DNA; note = uncultivated organism

SEQ ID NO: 7103 - DNA, 308 bp, unidentified; identical to SEQ ID NO: 15
  source 1..308: mol_type = unassigned DNA; note = uncultivated organism

SEQ ID NO: 7104 - DNA, 308 bp, unidentified; identical to SEQ ID NO: 16
  source 1..308: mol_type = unassigned DNA; note = uncultivated organism

SEQ ID NO: 7105 - protein, 577 aa, unidentified
  source 1..577: note = MG178-7163 large serine recombinase
MSKLSNKLNSIRVAIYVRVSTHYQVDKDSLPLQREELVAYAKYVLNAKSHEVFEDAGYSAKNTDRPDYQQMMARVRTGEFSHILVWKLDRISRNLLDFATMYDELKKLGVTFVSKNEQFDTSSAMGEAMLKIILVFAELERKMTAERVTAVMVSRAGTGQWNGGRIPYGYDYDKESETFSINPDEEKIVLKIFELYEERQSILYVARTLNDSGIRHRSGKEWSPTTVSIILKNIFYTGAYRYNYFDMSKRGSRQDIKPESEWVIIPEHHPAIITEERWRNVLLILEQNRRGWKASGKTYHRKNVHVFAGLLTCQLCGATMSATSSSRELKGGYRPSIYACMSHRKGTGCTNKYISDTVLGPFVLNYIANLIKAKASFGKTTSPETLHKKILRGDMFSEVTGIKEHGLMELYSLYRSQISGIKYIPASIDTEETDSASERDILLSERRRIERALSRLKTLYLYAEADMAEKDYIIEKKQLDEQLDKVNSRLEEISKGLTAQFSISDDELLAKASYFIMSQKLSDKRFVNYRRLLEETDPRILKDFINTVTCNFCIENGKIRSITFKNGIIHEFMYKDD

SEQ ID NO: 7106 - protein, 584 aa, unidentified
  source 1..584: note = MG178-7165 large serine recombinase
MVKKLSKRASEILETINSLRVAIYIRVSTHWQIDKDSLPLQRSDLINYCKVILGTENYVVFEDAGYSAKNFERPDFQKMMARVRSGEFSHILVWKIDRISRNLLDFATMYQELKELGVTFVSKNEQFDTSTAIGEAMLKIILVFAELERNMTSERVTATMLARASDGKWNGGKVPFGYSYDKEEKSFVINEAESRVVRLMYDLYDEQHSLLAVSKELNRRGYRSRKGAEWSPVTVGNIMRSPFYIGSLRYNYRRESGPSFTFRPESEWVMIEDHHPQTVTHEQWNRVVSTMRSQRRGQPGHGKSFNRGNVHIFAGIITCGYCGSLMRASQDRPRKDGWRPSIYTCSRKRVSNDCPNKYVSDISVGPFVLNFIANMIRARKSFGVSTSIETLQKKLLRGDAFKDVIGIGQSGLKELYRHFKGTQDQEQNFMADPGSTATTEQEEREVLLSEKRRKERAINRLKALYLYSEDEDAISETDYIVERKRLIDSLETIDARLAEIDKALSEQATLSDEEFIAKASYFIMAQQLSDKRYIDYERFVRKVDPQIVKNFVNLVCSNFCIKNGRVVSIRFKNGIELQFFYNDL

SEQ ID NO: 7107 - protein, 514 aa, unidentified
  source 1..514: note = MG178-7169 large serine recombinase
MRTAAYARYSSDNQREASLDDQLRNCRAYCVRQGWPAPTVYQDAEISGSRTDRADYQRLLRDARQFDVILVDDLTRFGRDKEELGTIIKRLRFHGVRLIGVSDGIDTARKGYKVETGLRGLMSELFLDDLADKTHRGLTGRALAGASAGGLPFGYIVTETGQRAIDETKAAIVRRIYADYLAGRSPREIVSALNAERVPAPRGGQWHLSGVYGDVRRGLGILANPIYTGRQVWNRSHWIKHPDTGRRVRQERPPSEWITTEQPDLAIIDAATWTAAQARIRAASPKRTGDKQGGPGRPARYLLSGILHCDQCDGPMVIVDRYRYGCSRHKDQGDAVCTSRTRVPRALVEDALVAGVRAELLSDAAFRRYQRATAEALKRAAPDTAAAKRSLAAAEQVQQNIMAALRAGIITPSTRTELIAAEAAVTTATSELQALQSIQPTHILPRARERWNNVVARLTDTRDIPAARDALRELIGNRVTVKNENGELFAEIAASECQIKLVAGAGFEPATFGL

SEQ ID NO: 7108 - protein, 526 aa, unidentified
  source 1..526: note = MG178-7170 large serine recombinase
MAYCIYLRKSRMDLEAEARGEGDTLARHEKILLELAKKLKLNIGAIYREIVSGETIAARPVVQRLLSEVGQGMWEGTLVMEIERLARGETIDQGIVAQAYKYSNTKIITPQKIYDPQNDFDEEYFEFSLFMSRREYKTINRRLQTGRIASVKEGKYLGSVPPYGYTIKRLEKQKGNTLAIVPEQAEVVRNIFHWYTRSENRLGVSLICRRLNEMKIPPAKGDVWVPASIQTILRNPTYAGKVRWKVRPHRKKMVDGQVVKERPRANPSEWIVVDGLHKAIIDWETFELAQQYLSINSSRPCPKFAPIKNPLGGLIICGLCGRKMVRRPHGTRYPDTLMCPNVACQNISTQLSIVEERLLEAIDNWMQNYKLQWKDDDFESSKTADYRILLKSIKRLDDEIATLDKQMNSIHDLLEQGVYTTEVFLDRSKKISDRINELKQAKKELNEQYQAFEQQEVNKKFIIPKIEKVLDIYRTVDDPEIRNQLLHEILEKVIYTKTQRGNRGGHADNFNLVLYPKLNVSKDFNY

SEQ ID NO: 7109 - protein, 539 aa, unidentified
  source 1..539: note = MG178-7171 large serine recombinase
MYLTLSEYINSIEKLNAAGTKDTKIRDLLEYYQRYNCSVTPGPGVFYAVIYARYSSHSQRDESIEGQVREDLEYASRNNMIVLGVYIDRALTGKEIDKRISFQQMIKDSTRGKWQYVITWKVDRFARNRYDAAIYKARLKKHNVRVVYAREQIPDGPEGILLESVLEGQAEYYSASLSQNIRRGQEDNAMECKVNGSIPLGYRVGADRRFEIDPGTAPIIHTIFELYDAGHTYQDIEGYLNSRGYKTQKGGPFNKNSFNRILKNDRYIGTYRYKEVTVENGMPAIIDKELFESVQRKIEKNRKARAHKKSDMNFLLTTKLYCGLCGKAMIGESGTGKLGGKYYYYTCVGKKRDKTCKKKPIKKDWIENLVIQETVRLILQDDMINEIADKVMEYQAREADHTILHSLQIQLNDTEKAIKNLIAAIEQGIITPSTKNRLEELEDEKIRIMNGIAEEDTIQPVVERDQILFYLKHFQNGDVSDPQYCQTLIDVFVNAVYVYDDRIVITYNYSGAHNSVTLEQIEQALGESEGSDTVSSAPC

SEQ ID NO: 7110 - protein, 520 aa, unidentified
  source 1..520: note = MG178-7172 large serine recombinase
MSRKLIRVAIYARFSCDKQRDASIEDQLYECNKYAERHGYTVVMQYCDYAMSGRSDDRPNFLRMIEDAKTGMFEIILVWKMDRFARNIEEQYYYEHVLRKNGGVTFESVKENIAGTSIEATSTKALNALFAEVRSRQSAEDTMRGMLGKARKCQYLGYPLYGYSHDGDKITLDPEKAPIAKRIHVDFLSGVAPKQILDWLLSIGVKTARGKDPGYGFVVSMLKNVRYAGVYMWGVKKDEAGNDVLDDLGRPVPLVYIEDGMPAIVSMSQKLSCIEKLGFRRRLKTNADYLLSGKLICSKCKEPMHGETAIGGSGIEYWRYSCRGKRKACLGSFNKETVEQGVVSGVREMLRDAALVDYLIDRHIQFRDERQSKATIEAVRKDIRAVKKQRDNLLSAVAEGLDFNHVKPKIAALDAQERALEKRIEELKREQNSVSREELRAFFSDMSKGALSDEQITLTFVSKVWLYESTAVAVMNFDSCESTQYEIELALKKHERPDQQAVRETSKWCPRRDSNARHPL

SEQ ID NO: 7111 - protein, 526 aa, unidentified
  source 1..526: note = MG178-7173 large serine recombinase
MSYLMYLRKSRADKEAELRGEGETLARHEQILSEFAAKMDLPIGAIYKEIVSGETISSRPKMQQLLIEVMQGHWDGVLVMEIERLARGDTKDQGTVAEAFKFSNTKIITPIKTYDPLNEYDEEYFEFNLFMSRREYKTINRRIQRGRIAAFNDGWYIAGTAPYGYKKVKRKGDKGYTLDIVDNEAQVVRMIYDLYTHGELQDDGSYLRFGSYQIKDRLNDLHIQSRSGSTWSAAAIIDILRNPAYAGYQRWSWRKVQKKLVGGNIVESRPKNDDCSKVKGRFEAIITDEQFELAQKIREGKPTPIRSTNALQNPLSGLVYCEKCGTLMTRQPSNTKDHYPVLRCPNSKCTNISAPLYLIEQKLIEGLAEWADEYELNWPKKDWEDTEISTATYQHSVDSMQGKLDTITKQLSAAYDLLEQGIYTLQVFQERRSTLEKQKEESETELQRLNRALEISQARARAKREFLPTIRHIVDTYWTIDDVLVKNTMLKEVLEKVDYLKTERNKKGGKGNANFSIYFYPRVPKY

SEQ ID NO: 7112 - protein, 475 aa, unidentified
  source 1..475: note = MG178-7174 large serine recombinase
MKIAAAYLRVSTERQDEYSLDSQLKLIRDYAASNDYIVPDEFVFIDDGISGRSAEKRPEFLRMIGTAKEKEPPFEAILVWKFSRFARNQEESIVYKSMLARCGVTVVSISEPLAEGAFGSLIERILEWMDEFYSIRLSGEVRRGMTERVSRGEPVTIPSFGYDITDKTYVPNRDANTVRRIYADYLAGKGVSTIARELALEGVKTRRGKSPENRWVQYILENPVYIGKLRWSPDGKANYTRSEVGDSAMLVDGTHEHIIDDATWAAVQDKIARSKRGRIPYQRREQPVDWMLKGLVRCDTCGSTLVYTSTACPSMQCHKYAHGACPTSHALSIAKANRAVIAALESCAASLSFPVAPQTVKPVADEPDYSKLIKQEQQKLRRLMDAYEEGVYTIEEFAARRAKLDDKIAQLKKQAEKNTPAIIDVQEYKVRVLDVLDIIKSDNVSEADKNTALKAILSYIVYEKANNRLALYFYF

SEQ ID NO: 7113 - protein, 527 aa, unidentified
  source 1..527: note = MG178-7175 large serine recombinase
MRTAAYLRYSSDQQRDASIRDQLRNIETYCDRQGWQKPLVFQDEAVSGARSDRPGYRALIKAARDRQFEVLLVDDLSRLSRDHIEAAQAVRLLKFLGVRLIGVSDGLDTARNGYKLETGMRGLMAELYLDDLAEKTHRGLMGQALDGYSAGGLPYGYASVHDGHGHRRVILEEQAQWVRWMFDRYIRGHSPRAIAAELNALGIPSARGKTWCLTAIYPDAKHVGILGNPIYNGRQIWNRTKWIKDPSTGRRKRILRPESEWVITEHPELKIVDDDTWSAARDRALKTRARTARQRENLRRASISGGRGPKYLFSGLLRCACCGSSYVVVDRYRYGCSAHKDRGSAACSNSIKVPRYAIERTLLAGIKEELLSDRAYRAFESEVRRLLKTAQPDIGEARRAAAKAQAEVDNIIGAIRQGIITPATKQALEEAEGRLDAAKRRIKEIEAWQPTQMLPRAKQIYRGLAERLERIEDIADAREALRSILGEDIKLVPENGVLWAELKGGCAALSQITVVAGAGFEPTTFGL

SEQ ID NO: 7114 - protein, 583 aa, unidentified
  source 1..583: note = MG178-7176 large serine recombinase
MMRAAVYARKSNEQDVQEEVRSVTRQLEHGRAFAESKGWSVKDDHVFSDDAISGMHGEEKRPGLKLLLATMELVPRPFDVIVMASDDRLMRNQLKVGAVLERIQEAGVDLYYYLENRKVDLSTVVGQFMESVHAMAAHDYRVKLARHTRDGMKARAKAGFVIGGRTFGYDHVPVDRGEVSTRKTRRVPMTRVINEAQANIVRDIFTRYAAGQSPKQIARTLNSRPGILVPGGKHGIPMLRWSRHQVRETLQHVLYTGVLLSTWNGEQIRVERPDLRIIEDDLWQQTRARFANLREQYIRMKHGQLLGRPAHSVESAYLLTGLIQCGVCGRSMLATTRKRANHTKRKYYQCVSNMNNRRRACDNTLLAPMDATDAAVLQAVEQSVLNPSILCDAIAHALSKLDGTENRQQEQTRLAEELSQLDTQMKHLADSIAKLGGNDTLLDEVRQREARRQEIGAERSRLESLESLSTLDLGQVEQDLRRITDEWKGAQGFTNRHPAAARTILKKVLPSKLILTPHPESRSYSFAGDGAIGPLLGQVVSSQMGKGQGSSGEGRVRRPNHAATKDSWTTSSACCRSRRRARA

SEQ ID NO: 7115 - protein, 522 aa, unidentified
  source 1..522: note = MG178-7177 large serine recombinase
MNNTYTLENVIIYLRKSQSDDPAMSVEEVLKKHEDVLQEFCENEFGKRIPEKQIYREVASGETIEDRPVIQAILKLMETDSLKGVIVVEPQRFSRGDLQDCGRIVNALRYTNTLAITPQKTYNLNDEYDRKFFEMELTKGSDYLEYYKKIQRRGREASVKKGNYIGSVTPYGYNKATYMDGNRTCHTLAINQIEAEAIRMMADLYLNKGYGFTKIARALDEMGYKPRKSEKWSPAAIKDIMENPIIIGKIRWNRRKTIKKLCDGEITKSRPKAQDYILVDGKHEAILDEETYYKILDKRGKNPRLRKSKELTNPYAGLLFCGTCGRAMSHKKYKQRKSNTISESMLCNNQANCHTKSVMYSSFEKSVIESLEKAIADFEVKLQNNNGDITSLRASRIKTLESELKTLLEKDERQKDNLDDGIYSKEEFLKRNAKVQEQIEATKKALSQVKDSILPEIDYKEKIVRFQDCLNALTDPNVSAPCKNMLLKSCIDKIVYHNDSESKAGIGRYVDNPFKLDIFLRL

SEQ ID NO: 7116 - protein, 497 aa, unidentified
  source 1..497: note = MG178-7178 large serine recombinase
MSEYIMYLRKSRQDDPTETVEEVLKKHEIQLQDFALNNFHYRIPSDDIYREVVSGETIDDRPMIQAVLKRIEDENIKGVLVIDCQRLTRGDMLDCGIIVHSFRYTNTLIITPQKTYTLSDKYDRKFFETELSRGSDYLDYTKEILRRGRDASKRRGNYIGSVAPYGYDRIKIGKDWTLKPNDESQYVKLIFERYTQGVGTFDIVNEIEKLGAKPRNSKSFDYNRITDIIKNPVYVGKIKVNEDETFKVMQDGKLVKKRKARKEYELVDGKHEPIVSQELFDKAQNERKKRTREPNSCVLQNPYASLIKCGYCGKAVTLHYGSKKRGGDKYKRLACTGRGCECVSHNYSEMNDAIIDALRNKLDDIKVQIDTDDNQSNANSKIIESLESRLSLNEKKMNDICGYLENGIYTIGIFTKRKKALEDERTTLEEAIMNAKKESESSSELESKTITLSQAIEMLKDDSISAKIKNNFLKEIIQVIYYKKDKLGNITLDIYLR

SEQ ID NO: 7117 - protein, 491 aa, unidentified
  source 1..491: note = MG178-7179 large serine recombinase
MNPAKIYLLYARVSPKGSTWDCNETSIGVQLADMRTHILRQVPDAQFIEVVDEFKSGKNLKRPGVQKILFDLESRPVPWHCLVVWNLDRLSRSLCDAIPIFSKLRDAGCEFISINQEYLSYTGAMARYMLHQTIALAELERGMTSERVSAKMRWIASEGKIPWGNIPLGYIRKPGVKNTVVIDEPKAEIVRTIFDMYIAGNLSYTAINKRWPGMIKDRGYLYRILRNPLYIGELHYAGKVQKAEHPAIIDKEIFEQTQSLLASRRRNYQRRGIQKYDYLLSGIVRCHCGRQMTGYSVNKKDGKYFYYKCTSPTCKNAINAETLDSSVLQQIASVFRNKSEIRASLQAYLEEQKEKQLAVKIHRNELEKQLAEAKQKQTRIMDMFLAGVVDQSNAKLWNSELAATRQSVELLEKEITELSVVPEIVFDDIFSDLMKAAEEWTKKIASGEADFATKRNLIMSVIESLECVKRSDTQIGFKMKLVMSSSCKWWA

SEQ ID NO: 7118 - protein, 534 aa, unidentified
  source 1..534: note = MG178-7180 large serine recombinase
MAKKYRYGPVAPCTQAVIFARVSTKEQEPGASLKAQKEAMEDYCNKKGLPIVKKYKAIESSTNGKRVQFNEMLDFVRKQKQKTAIVVHCIDRFQRRFNECVEVESLLLDDKTDLHFCKEGLILTKNSPSSDIMRWDMGILSGKMYVANLRDNVNRGMNYNWSIGKYQTKAPVGYLNVNKDIVVEPDRAPFVKKMFEMYATGLHSIKSLHNFAKEMNLCSSHSKTNKPLGRETIYAMLKNPFYYGEMVIRGEKMPHAYEPLIAKSLYDKVQELLSGGKIHTRTQEYAGIPFVFRGLVKCAECGCTISSETHKKKSGRSYTYLRCGHTKGACNQELVSENLLLQQLDDEVFSKIRLSRNILEPLKKCVQKRLIEESDANMIMKRKITTELNNLEARERRIKDSFFDGDITREEWQEEKANIVAKREELQRIAEKYADISKDIQITVNEVLDIAATVSDIMKEANPTQQNKLLSLMFAECYLDGQKLIYKLQKPFDKLVNLKSAGTWFDFDKSDIKEYETMAEKVQMYKIERTKYLG

SEQ ID NO: 7119 - protein, 512 aa, unidentified
  source 1..512: note = MG178-7181 large serine recombinase
MQKKIIDNKGKAVIYARYSSDRQREESIEGQLRVCEEFAEKNNLQVIETYIDRALTARTDRRPSFQKMIADCKKKQFEYILVYKLNRFSRNRYDSAVYKHKIAQYGVKVLSAMERITDDPSGILLESLIEGIAEYYSAELAENVHRGMKENALEGKANGRLPLGYQKGSDGKVIVDPATVHAVKAIFNGTAAGKRMKAIAAELNEAGYKNAFGRPYVPSSFAAIIRNKKYIGTYQWADTEVEGVLPALIDNATFEKANEVLDSRKRKSNRVRSDQYLLTGRLVCGDCGASYVGKSGTGRLGHPYPYYCCANRIKRKGCTAKNFRQDKLETWLAVETVKALNHPEVIQQLSTQILDAQKRLKSEKDPLIDGLAAEIKDYQKRLANSIKAIESGIFSKTISANIKDYEEKIKALEKQLSRAKLKQQPFTLTADHIEFFLTALLQGNPEDQMYRNNLLDVLVSRVVLYPNRAEVFYRYKKELPSLPNPVIIREERGSNGTQLVGPLGFEPRTNRL

SEQ ID NO: 7120 - protein, 616 aa, unidentified
  source 1..616: note = MG178-7182 large serine recombinase
MKKAALLLRCSTDSQDYDRQQRDLLPTAESMGYEIIEDLIFGEYVTGKDDVRKKDRESIANLKQACKEGKVDAIFINEVSRLSRDSIAGRLFIREFNDDYKVPVFFRDLQMWTIDPNSRIKNTYLEQMLGFYFDAAAAELKSMKTRFASGKRKNARTGKSIGGVPSIGYTKDKEGIIIIDEDTAKYIRIIFSKYLEKEGTITTVGRYLRGISNIRTWGNGTIGNILRNRAYTGKLEVSITNPDETDDSKKIEKFITTIPVIIDEETFNKVQQKLDSNRSTQEYTRSKVHLLQKLIICSDCGKAFSTKTVNSGRNYTYCCVSKQNGINCSLPIALDADKTEAIIWNLVKSKLIELNKLGEKEKEERIAKEKQQIQIYEEEITAIELGIAKIARKKKNLIDYLEEAESDEEIADIKARRKKYDSEIAENKTRINHLKEKIEICKSNINQHLNSSLTSSILSSIESDRNKMKVQIKEFIKRIIPYPIANSHSVLEVCTTFGRYYILYSSRDKYKQAYFLYGDYYRYFQKNNKFLVLGDMDEDTIEKNMKVSAFARTFTVDGYSKPKNTDTSNDKENISLSDAIKQNIYHFSKNNNIGVYTYEEMKEKCRKMDWVLPFTI

SEQ ID NO: 7121 - protein, 559 aa, unidentified
  source 1..559: note = MG178-7183 large serine recombinase
MKPKCFSYTRFSRPEQAEGDTLRRQDSMAFEYAEKHGLVLDKSLNMSDHGLSAYSGDNKKKGALGSFLKLIKDGKIAKGSVLLIEHVDRLSREPFNDAHVQFNSILESGVDIVTLSDSQHFNRQSINDIGSVIPTLIKMDLSHQESEKKSQRLKAAWQNKRDNVSTKKLTSRGPAWLELSDDRSEFIAVEERAKVIKMIFDMKLGGKGSQLIARTLNQDSELWKPSTKWRKSYIGKILRNRACIGEFQPMRRIEGVRQPVDQPVKDYFPTVVQEETFLKVQALIKNNKFYGGRNGAISNLFSHLMRCGYCQGPMRLIDKGKGRKKLICDNAVRGIGCERLQIHYKNFEDIILDFCVGLKVSDLIKDDQHLIELEQLKDKVLLIDDRLKTIEKEEAFFIKRMKKTLDDRIADDYEKGISALKDEKEILKEDRSKAQTEIEKLSVLDADIKLRLSDIKDLKEIMKNLKGDELRDIRLRLRDKIRDLIDSIDIFAKGDPKETENLIEDMKGIYTEDELKDELKGDPNYVISFKSGVIRSLFPYKDKKLSWQLDKTKKQLDIY

SEQ ID NO: 7122 - protein, 545 aa, unidentified
  source 1..545: note = MG178-7184 large serine recombinase
MQNNSGVLWVRVSSDDQAKGYSPDSQERLLESIAAKREIIPVKKFNVTESAKTSENRKLFKEMIEFIKKNEIRNLVALSADRLARNYQDFTTLQILVDKHNVSIILAETNKIINQNSDYSDRFLFQLLASLSEMGNRQRSADTRRGMEQKARQGGAPYYVPIGYLNVVDPQNPKRKFVIVDEERGSLIKKAFELYDTGKYSLFTLADELNRLGLRTRPTKSHSAAPITKSSIEVILKNKFYIGLVLQRGQYYPGAHQPLISKQLFDSVQGRLAQHCSYSRPDSKKVFPFKKFLKCGYCGCQLTGEEQQGKNGNSQYRYYRCTFSKDRNCPQKYYREEEIDKMLTEAMGDLYVDETIAEEIRKRLKSTHLEQSSWEDKERARLQAAETKKTRHLDLIYEDRLNEIITPEQYKQKSNAIQGELAQIKSDINKLGKTNLKYKEEGSTILALLKGLKQTYEKQDYQGKAEILALVLDKVFLRDGKAQFHWKPPFDFLFSINKILEEEEPQAGSFIRSSERDPDSGLKSICSISRKGRFSRGIYPGSPLI

SEQ ID NO: 7123 - protein, 549 aa, unidentified
  source 1..549: note = MG178-7185 large serine recombinase
MTKRTAIYARYSTDLQNERSIEDQLALCRSYAERNGLLIVDTYTDAAVSGSSTVNRQGWLKLMRDAEAKRFDLVLAEDVDRISRDEADYHTARKRLAFLGIEIWTAHSGKVTGIEGSVRAMMASHYIENLAHKTRRGLAGVIKSGRHAGGRAYGYRTVPGKPGELEIIPEEAEVVRRIFTDYVCGRTPREIAHALNNEGTPPPRGKRWSASTINGNKARGYGVLQNELYAGRLVWNRVRMVRDPATGKRISRANPKSAWQTQEAPHLAIVSREVFDAAQFRKAARSIGGGHKHRRPKRLLSGLLKCGACGSGMSVFGADKTGKVRIRCTAATESNSCPDPRTFYLLAVEETVVDGLRRELQDPKVLTEYARTYIEERNRIAQRAAQDRGKLERKLAKVSGEYDRTLRLYQKGVLSEEVAERKLPRLQAERDRLTAELEAEPVVENKITFHPGTLARYEGALARLQTELEKGAAESDAEQAAAIRELVETVTVRRDPSRRGGVEVEISGRLAALLNAPVYPGHLRSPVGGNAGSGGGTRTPDTRIMIPLL

SEQ ID NO: 7124 - protein, 483 aa, unidentified
  source 1..483: note = MG178-7186 large serine recombinase
VRAATYERISQDRESTEHGVDNQRSANLALAARLGFDVVSDYRDNDTGASTRSRKARPGYAAMLAAAKRGEFEAILAYSNSRLTRRPREFEDLIELHEQYGIRIVTVVSGDDDLSTADGRMVARIKAAADAAEAERTGERVAFAQAAKLRRGEDIGGRRPFGFEADRITIRESEATLIREGVRMILGGASLYAVARAWDAAGIREKPWRSQTVRDILTRPRNTGRLVVGGVEYGRGDRPAILTDEEYADLLAVLRTNERPRRGRKPQTSTAVSVVRCGVCGAGVELTIKSGGVRTIRCSVRGGGQRHPTMTDDRLEMQLAQVALMRVVDPFATENADRPEVAKLRRTLADVTTRRDRAREDVEAYDDPDDRAHARKRVTELTAAVREARAALDAALAENVASRARHLVDVAHKRLGGEIVAVDPFQVWPQWVELWRSWPVADRRELLRGRLIELMPHVRGESWRLRVDGKRPAGATQREGEPI

SEQ ID NO: 7125 - protein, 502 aa, unidentified
  source 1..502: note = MG178-7187 large serine recombinase
MAKGNRAAIYARFSSHNQRDESIEIQVEKSREYCEQRGLDVVCVYSDYAQTGRNTARAEFQKMMDHAKLGMFDYVVIYKVTRIMRNRDEMALARIMLRQAGVEILYAGETLGHGSTRVLHLGMLEVLAEYESAVDSERIRDGIQKNAERGMANGQTRYGWDIVDGYYQVNEQEAALLRRMKNMLLSGSTLAEITRAMEGERTRAGKKFTIKGITKLLRRWQNCGVYEYAGVRIEDGMPALWTREEQEMLIRILTHRTITQRRRGEAEEYPLSGKLFCRECGRYYSGTCGTSKSGTRYFYYRCPSCRRAFRSGLIEAWACDAVFEATKGKHFKEQLADAMAVFDESSNGAHEIEAKRLRKEISKIDAAFERIWKAIEDGCAPPGGKDRIADLKTRKAALEEDLAQAEAVSSCENISKEDLEEWIGLIAKENDTKKIIDRFVRFIEFDGQEGHIYFTFDHHGNDFMPTKKANTQMKGCSPIESMVDRRGLEPRTLGLRVPCSTN

SEQ ID NO: 7126 - protein, 518 aa, unidentified
  source 1..518: note = MG178-7188 large serine recombinase
MQNLPSGEYWMYLRKSRADLEAEARGEGETLKKHERMLYKLAKDLGILITEEPFREIASGESIYHRPEMLRMLDLMEERRPKGILVMDIDRLGRGDMQEQGLILGTFQRLNILIITPRKIYDLNNEFDEEYSEFEAFMARKELKIITRRLQRGRVLSVEAGNYIATRPPYGYQVIKDGRNRYLVPHPEQAPVVKLIFELYTHDDPEKRMGSNKIAIKLNELGYTSYTGKKWTSSSVLTIIKNAVYIGRIQWKKKEVKKSKITGKKKDVRTRPVQEWIDVQGKHEPLIDEVTFQKAQEILKQKYHVPYQQLNGITNPLAGVIKCAKCGASMILRPYTKQAPHLMCYNRFCDNKSSQIAYVEEKLLQALEKWMDTYVIEYGQRKRKVSNMVEVKQNAVNLLKREMDELEAQKERLHDLLERGIYDEETYLDRSKKLAERISSTKERIERAEQELKEEQHKEQAQKDVIPKLKNVIKLYWKSKYPAKKNALLKSVLLHATYKKEKWQRKDQFELVLVPKFK

SEQ ID NO: 7127 - protein, 534 aa, unidentified
  source 1..534: note = MG178-7189 large serine recombinase
MKKEIKEEPKKKAVVYARYSSHRQGEQSIEGQLAEAYKYAAAHGIKIIHEYIDRAMTGRNDNREQFQKMLRDTAKKQFETIILWKIDRFGRNREEIAFNKYRCKKNGVKVVYVAESIPDSPEGVILESVLEGMAEYYSLQLSQNIRRGQRASAEKCQCTGGNRPLGYRTDPKTKKFVIDKETAPTVKMIFEMYANGIPLADIIRTVNNKGLRTLRGNKFNKNSFKRLLKNEKYIGVYKYKDDILVEGGIPAIIDKETFERVQEMLKKNQTARSAKGKKADFLLTDKIFCGRCGEPMIGESGVGKTGKVYYYYTCTDRKNKKQACKKKPVPKNKIEKLVINKIAEILHNEDLLDMIIDKVYAVYREEHNNDDERIMLNKKLAEIHLAQENILKAIEQGMISPLFKDRTAELTAQQSEIESELASIEAQEKIQLTKEHIRFFLEDLSSKDIDDTDVQKKLIDTFLNAVFVYDESVTFAFNYSNNGEKVTLSEVDNINGSGDFFECGYDGGDDETRTHYLYNANVALSQMSYAPKRL

SEQ ID NO: 7128 - protein, 477 aa, unidentified
  source 1..477: note = MG178-7190 large serine recombinase
MFSDFGNELKYAVKYTRVSTNQQDDRGSKEIQDLKINEFADKNHFKVVNSFTDTDHGDNPLRPGINALKSYLKANGEVKYVICLFQDRFTRDFREGLENLYFLKDLGVSLITVNEGLIKMDGTFDSIPALIRFIGAQEEKTKIVKKTTDSMYNYANTNRFLGGSILPWFKLEKVSENGKRIKIIVKNEETWNIYRKFFIDIIRMKSVKKAALENNLNPYTVRDWVKMPELIGYRTYGKKGKINNTYKKGKRAEYMVTSEKVLPSILSEEEYAKIDSVYKTYKVKFTSSRFPYLFTTLLHCECGGRYFGNSLKNRYNTYYHYYKCEKCAKRYNAKNIEQEIIDAILENKNLNMLNDYNFRIADLYDQITILNKKIEIEKAKENNIVELMLEGIISNDISKEKLRTLKNNITNIEKEKKKLEEQIEIESNKEITEEHIESLKFLLKNYDEETVSELKEILNLIIQKIVLSKNGEIEVIF

SEQ ID NO: 7129 - protein, 488 aa, unidentified
  source 1..488: note = MG178-7191 large serine recombinase
MNAVIYARFSSDRQNEASINAQVRACTEYAERHDLTVTGIYADEAISGKESKTAARAQYQKMLRDAHKGLFSVILIHKYDRVARSLAEHVNLEGRLKADNIELVAVAQDFGNTSEAKIMRALMWSMSEYYLDNLSAEVQKGHRETALKGLHNGGYAPFGYDVVNQQYVINELEAAYVRRIFTAAQEGTGFKHIIAELEAAGITGKRGKPIKYTQIYEMLRNEKYTGVYLYTPQEAVERAQRRQKPEAIRVEGAIPAIVTKAQFMEVQAIMNSRKNAGRKADYMCSGLVYCSCGAKMHACKSTRKGHTYYRYVCSEHCGRPTVLMSAVDEAAIRYLRELLSDPNQMLITAAMRRYQSDSKNRLTAFYDVLNARIAEKQKEYDTLLKNLSSGVLPSDVVADIGQRMTEIKDEIKALEATEPPEDYTVDTITRWLNALKNNPDEKAVKLLVKRIDVSGDKKNNVFNIQSTLNTLLEIMVAETGFEPATSGL

SEQ ID NO: 7130 - protein, 557 aa, unidentified
  source 1..557: note = MG178-7192 large serine recombinase
MTLQKARIGGETTKAVIYARYSSHSQREESIEGQLRECHEFALKNGFTIINEYIDRAISGKTDNRPSFQRLIKDSEKGQFEAVIMYTLDRFARNRYDSAIYKAKLKKNGVRVYYAKQPMPDTPEGIILESVLEGYAEYYSENLARNIKRGIRENALQGLATGGANLLLGYTVGEDRKYAIDPTGAKIVQEIFQLYADGMSATQIIAYCNERGYKTARGNAFNKNSLRTILRNEKYIGTYKLMDIVIPDGMPAIIDKVLFEKVQAMLKHNGKARAKAKAHENYLLTTKLFCGHCGSPMVGESGTSKTGQVHYYYKCTKAKREHACKKKSERKDWIEKLVVRYTVQNVLTDENIALIAKRAMEIIEKESADTTYLDGLNAELKDVQKKIKNLVSAIEQGIITSATKDRLDELEQEKSDVEGRIAREEMKKPLLNESRIRYWLTSFKSGNVDDEDYQRRVIDTLVNSVYVYDDEDGGKRIMLTFNLSGNNTATLTSSDIGCYAPPKEIRRNTVSAVFLYNRPTVFVPVPHLQRRHHEKETDRKRVRLCCQHAVWLVLRRR

SEQ ID NO: 7131 - protein, 490 aa, unidentified
  source 1..490: note = MG178-7193 large serine recombinase
MLSKNACAYIRVSTDKQEELSPDAQKRLILEYCKKNNLTIMSEHIFVENGISGKKADKRPQFQRMIALAKQKEHPFDVILVWKFSRFARNQEESIVYKAMLQRAGVEVVSISEPIIDGPFGSLIERIIEWMDEYYSIRLSGEVMRGMTEKAMRGGYQSTLPLGYHMNPDTGVPEIYEPEAAIYRIILDRYLNAGMSPLAIARELNAAGYRTRRGAPFERRTIIYILENPFYTGMIRWNRQNHSDHTIKDRSEWIFAKGAHAPLIDKDTYDHIQAVTALRTRPYKARGTSSIKHWLSGIVKCSDCGKSLVGNALYNGVPSSWQCSDYNKGRCCHSHFIKNTALEQAVFNALEHAITSGDISYTLKSTDSSSDLASDLDRMLSKIDDKERRIKQAYRDGIDSIEEYRENKEILTKERQDILSRLAALSERSSEDDKKKLLAEVQSVYDIVTGNADKLTKANAIRSIVDHCVYDKANDSFDIFFFFSKGSEPL

SEQ ID NO: 7132 - protein, 526 aa, unidentified
  source 1..526: note = MG178-7194 large serine recombinase
MVFASYTRKSIYSDKSDSTKNQAKMCRDYVDFHYAGSVDSFLVYEDEGLTGSNTKRPDLQRLMKDIKSGLIDFLIVYQLDRLSRDIKDFSNIYAFLEEHHVQFISVAENIDTNTPIGKAMMYVSVIFAQMERETIANRVNDNMIGLADDGWWVGGNPPYGWRRTRITSSDGKNHVTIVAEEEEAEFVISVGRIFLQNNFSLQQLERYFKNHNILTKNGKFFSTNQLHKLLTMPYCAPATQAIYDYYSNLGCIMSSRCPRELWDGTHGVMIYGRTTERNKKHALQPPNKWRVCIGRHKPFMDESTWLSIQNQFTHNVFDKKMKHPIPLLKGVLRCKCGRLMMLARKAKVDGSVSTWYYCPKRMRQGADYCDMSQIKTDIIDDKVIDIFNKISKDPDTINEYLLVSVPVKDFNTEIKDANKSIIKIKNKIQNLTNALAETPDTSAAKYILNTIDGLDKNLKLTERHIADLQSQERKSSQTELEVYEKQRKITDFIRNFENFTPEERNAIARTCIKECVWDGHTLSVVL

SEQ ID NO: 7133 - protein, 485 aa, unidentified
  source 1..485: note = MG178-7195 large serine recombinase
MLNVVIYARFSSSAQREESIEDQLRECQEFADKEGLQVINTYCDYAISGKTDHRDQFQKMIKDAEKQLFQAVIIYKTDRFARNRLDSAIYKKRLKDCGVKVIPAKEVIPDGPGGIILESIYEGWAEMYSVNLAENVRRGQHGNALKCKANCKAPFGYKINPQTRLYELDDTTAPIAEKVFAMAAEGKPTKDLQKFLLSNGIKKSASYIHYMLRNERYKGIYIFDGVRVDGGMPKLVSEDTFTKIAKTLKQRSIRPQANAAKYFLSLKLYCGYCGKLMSGEYGRSRNGDQYRYYTCPSSRRKKTCELKALPADKTENTIAEKLQTTLLSDEIIDTMADYIIDYQRQVYENDSMEKALSKQLSDVEKRINNLLAAIEAGAMTDSTVNRLHDLETKQKELLTSLSIEKLKAPIITKEKIVYYIKKYRDNDITVNEIRQEFLNTFVSKAYVFSDHLFVIYDAINGINTEVTPEILSNPNEFGYIPIWWN

SEQ ID NO: 7134 - protein, 475 aa, unidentified
  source 1..475: note = MG178-7196 large serine recombinase
MNAVIYARFSSDKQSEDSIEAQVRACREYAAKHGFNVLSVYADEAISGKTANRAQYQKMLRDCNKGLFDTILIHKYDRIARNLGEHVNLEMKLKEKGITLIAVAQDFGRSKEAKIMRALMWSLSEYYLDNLSSETKKGHKETALKGLHNGGYAPFGYDVVNQTYIINELEAGYVKRIFDAALNREGFTSLIEEMDKAGIRGKRGKPIKYPQIYEMLRNEKYTGVYTYSQEEETNRSDRRNKPHAIRIENALPVIISKAQFMEVQKIMNKRKQTGRKGNYLCSGLVYCECGAKMHGMTSKRKGHEYRYYTCSKHCGAPVVRADDVEQAAYRYLYTLLSEENQTRIADALRQYQAGEGSRMDEFKQALAKRIQEKQNQYKALLANLSTGALPAEIVADIAAEMKDIKEEIALLERTEPPKDFTVDQIRAWLEALKATPDDKAVRLLISRIDIKQKTIINMESTLTMVLSEIGCGSWI

SEQ ID NO: 7135 - protein, 510 aa, unidentified
  source 1..510: note = MG178-7197 large serine recombinase
MQKTDNKMRAVIYARYSSDRQREESIEGQLRVCEDFAQKNDLMVVDTYIDRALTARTDRRPAFQKMIADCKKRQFEYILVYKLNRFSRNRYDSAVYKHKIAQYGVKVLSAMERITDDPSGILLESLIEGIAEYYSVELAENVLRGMKENALEGKANGRLPLGYQKGPDGKVIIDPSTAPAVKLIFKGTAAGKRMKVIAEELNAAGYKNASGRPYNPNSFAALIRNKKYIGMYQWADTELEGVIPALIDKATWEKANGVLNSRKHKSNRIRSDQYLLTGRLVCGSCGSAYVGKSGTSHRGTTYQYYCCSNRIKRKGCKGKNFRQDQLESWLAAETIRTLNHPDIIRQLSNQILAVQKSLETEKDPLIDGLSAELKEYQKRLANSIKAIESGIISDTISANIQQYEEKIKILEKQLARAKLKQQPFTLTASHVEFFLSALLDGDPKDQEYRTKLLDILVSRVVLYPNKAEVFYRYQKELPSLPNPVIIREERGSNGNQLVGPLGFEPRTNRL

SEQ ID NO: 7136 - protein, 475 aa, unidentified
  source 1..475: note = MG178-7198 large serine recombinase
MNAVIYARYSSDKQTEDSIEAQVRACQEYATKNNINIIGVYADEAVSGKTANRAQYQKMLRDCDKGTFDTILIHKYDRIARNLGEHVNLEVKLKDKRVTLVAVAQDFGTSKESKIMRALMWSLSEYYIDNLAAETRKGHRETALKGLHNGGYAPFGYDVVNQTYVINELEAAYVKRMFNAALNREGFTELIEEMNRAGIRGKRGKPIRYPQIYEILHNEKYTGVYVYTQEEESDRGNRRAKVNAIRKENALPVIISKAQFMEVQQIMKQRKHSGRKSNYLCSGLVYCECGAKMHGMTSKRKGHEYRYFTCSQHCGAPVIRMEEVDEAAYHYLHTLLSEENQDRIADALRLYQAGEGSRMTEFKQVLAKRIREKEEQYQSLMENLSSGILPKEVVSDIAERMQQIKEEIAVLEATEPPKDFTVEQIHSWLEALKAAPDDKAVRLLVSRIEVKQKTVFNIASTLKAVLCETGCGSWI

SEQ ID NO: 7137 - protein, 506 aa, unidentified
  source 1..506: note = MG178-7199 large serine recombinase
MENNSAVIFARVSSKEQFERWSPKIQEEAAAKYAEAHKLDVVRVWNIAESGYKSRKEFQAMLAFIKGNSVRHLITMNSDRLTRDLRGMLDVDKMIQDENLSVHFIESNEIIDANTTRSQKSLWKIKVIFAENYIGDLQEKVRRSMEARLDIGLFPFINPPFGYDFKKNRLTPNGNADVVRKAFSLYAGGTESAFSLMKKLKAEGLRLSEPAVNNLLHNPVVAGLLVWPWDNSKYVKTEHFRNELIQGQQEAIVDRETFERVQEILKRKTHSHPFKKDQIFFQYRGLIRCACGKLLSGAQFGKIVYYAPKHRDSSCGEKPVRSEVIDKAVAQALKGFSFPKDLYDWARDVLRTTREDTKSHAQAERRKAQTEYSLTIKELDVAFSSAVTGIFDVVTVRRNVMEIKERQEKAKAVLNGLDRSDRKFVDDGLAILELLKNVEKAYSQAMPEHRAELLRVLFEDISISGGKFVFTPQAVFAPLFDLRHGKPRQAAIRLAVGVPDLPEHGR

SEQ ID NO: 7138 - protein, 506 aa, unidentified
  source 1..506: note = MG178-7200 large serine recombinase
MNMSAGPRAVIYVRISVAQEASVSIERQVEAAEQYAAARGWQVVATFRDEGVSATHNKPEDRAGWRALLDSPEKYDAVLVWKIDRLARRVLDFLHADASLQERGAGIVAVEDPVDMTTPQGRAFATLLAVFGEMEGEAIRARVKAARDHLLRARRVVGGTVPYGWRKVANPDGPGYVLAQDPERVGWVRGMVERAQAGASVYSIVQWLDEAGAPLPEASQSRRKAGGWSYSTVERLLRNPLVAGMTAYNPGNRTKERGADVLRDADGLPVVDESVALLSPGEWRALVKALDERDTAQSKPVALRAKTSALLSGLLWCEADGTRLHRGTINGRHGYYCPECHQSISNFEDALVAEFLRQKGEHVRWSVVEEVYEGGAAVLPEIEHRLAELSDALRATDDDAEADRLMEQIGNLRAIRREARGKAPKVEYRPVRGTQRFGDDWADAETVEDRRAILEDGLERVWVSRGRPGRTTDAQRLARLRFDWKQPEHLGPLARPSDAELAAWAE

SEQ ID NO: 7139 - protein, 491 aa, unidentified
  source 1..491: note = MG178-7201 large serine recombinase
VIPIEVEKKRLGACYIRVSTDDQTEYSPDSQERLIREYAEKNNIFIPDEYVFRESEGISGRKADKRPEFQRMIGAAKQKPAPFEIILVWKFSRFARNQEESIVYKSMLRKQCGVDVVSISEPLMEGPFGGLIERIIEWMDEFYSIRLSGEVKRGMTERISRGKPTNAAPFGYRWGNDNYEIVPEDAELVRQIFERFINGESYLSIARWLRTVCDKRDWENRTVEYILRNPAYIGMLRAGIAGEKNNSRDFYGSNMKLYQGTHQPILSPETFQAAQKRADHIKNTHPKWDHSARAVPRLWTGILKCSNCGGTLSSGGKNDSWQCVRYLHGKGCGVSHYTTTKAVSEALLPVIIQDLKTGKNLEKLDLGQHTKSSESQDVIKQIDRLKARLKRVREAYEAGVDTLAEYKASREAIEKEIETLQHKVDKAPNAADIEKLHQKLMEKNQRYIKLLQDEKASDAEKNEALHHIVDKIVFQRSTNHFDVFYSESYML

SEQ ID NO: 7140 - protein, 545 aa, unidentified
  source 1..545: note = MG178-7202 large serine recombinase
MSSLITGECKISARVYSYLRFSDPRQATGSSADRQLQYAQRWAAERGLVLDESLSLRDEGLSAYHQNHVKQGALGAFLRAVDEGRIPDGSVLIVEGLDRLSRAEPIQAQAQLAQIINAGITVVTASDGREYNRAGLKAQPMDLVYSLLVMIRAHEESDTKSKRVKASIRRLCEGWVAGTYRGLIRNGQDPQWLRWDGQAWHLIPERVEAVRYAIELYKQGEGATRAARKLAERGYVLSDWGIAGQQIYRLVKLPALRGAKRISVDGEDYLLEGYYPPVLTDEEYEALQAATETRHGRRGAPEIVGLVTGLGIAYCGYCGTAVVAQNLLSRARKDGTVADGHRRLHCTSYSKSTGCKAASCSVVPVEKALLSYCSDQMNLTRLLEPADDGQQLRQRLQACRRKQADVERQLQRITEALLADDQGAAPLAFVRKARELEAQLGQLQAEAEHLEREQGKVGQTQTPAGAELWRKLAIEAQDIKSPAREQLRQLVLDTFSRITVYMRGLVPDPKSKVIHLVLVSRSGQRVVLDVDRRSGAWKAGRDRRG

SEQ ID NO: 7141 - protein, 508 aa, unidentified
  source 1..508: note = MG178-7203 large serine recombinase
MKTAVAYARYSSDNQRDESITAQLRAIREYAAKNGIEIVREYTDEARSATTDDRPGFQEMIRDLKNGLKVDLVLVHKLDRFARNRYDAAVYRREIQKAGARLVAVDQPLDDSPEAVLLESLLEGLAEYYSRNLAREVMKGLKENALKGLHTGGRPPLGYRLENGRLVIEPREAEAVRLIFQGVLDGKSYTAIQQELNAKGYRTREDRPFGKNSLSDILRNEKYTGVYVYNRTARKVAGKRNHHASKPPEEVIKIPGLIPAIITREEWDKVQEILNQRRKVRPRKRGETEYVLTGKLVCGVCGSAMVGNSKRNGKGTVYRYYECNKAQRTGECTNRPIGQKVLEQIVVQQIEEDILSNPEELAEQMAAYHAERGGYLKRKKMALKARLAACQEKIDKVIDRLIEIGREEELLRKLNELKAEREALQKEYAALPEEEPPVTKETALEYLNHVSEALKEAKSPAEYRAAIHRFIDRIVVGEKMIQIHFLADFGGGVWIKLVELEGFEPSTS

SEQ ID NO: 7142 - protein, 539 aa, unidentified
  source 1..539: note = MG178-7204 large serine recombinase
MKRIAIYSRVSTADKQDYTRQVNELKKIGYDNGFSDKQMTLYSEAISGYKKDERHQLNAMLSQIEADPTYFSAVYVSEISRLGRNPKETRRIVDRLSELKVTLYIQSLKRYTLDDKGAMSIDTSIILQVLMEYANLEAETFKTRSRSGLRKAAMDGKYIGGVASAYGYTQDKNNYVIIDDFEADIVRMIFTMYSEGQGTKKIANVLNTRKIPTKYNRIFEGTKRIIKGSLKEATKINWSDAVVYAILKNTSYIGEKKYKGEIIATPAIIDKKLFNKCQEIMSGKSHRNYLTNYTFLLKDLITCTCGRNFYARYKPVEGGDKVYVCSSRLVRGGRCACPNGINITLLESAIYDYLVTHSRYLTNMASVDKMKAKLWQEIKSLTDKANIDQKAMKAKANEEKRLLDVYVSGAITKAEFEAKKKKIKQEISVISEREKILEKDINEKNEAFKRADSGNAPLNALEKAKDNRNELQALYRQILTKVNVESTTKETAVVSIVINATKAVMIELDLSGIRRKPMQYQYRTGKDWVAIPDKRLISL

SEQ ID NO: 7143-7144 - skipped (2 entries)

SEQ ID NO: 7145 - DNA, 12 bp, synthetic construct
  source 1..12: mol_type = other DNA; note = MG178-7193 core
agtatggtggac

SEQ ID NO: 7146 - skipped

SEQ ID NO: 7147 - DNA, 14 bp, synthetic construct
  source 1..14: mol_type = other DNA; note = MG178-1859 core
ttcatttgacatcc

SEQ ID NO: 7148-7149 - skipped (2 entries)

SEQ ID NO: 7150 - DNA, 22 bp, synthetic construct
  source 1..22: mol_type = other DNA; note = MG178-7198 core
aactggttgcgggagctggatt

SEQ ID NO: 7151 - DNA, 308 bp, synthetic construct
  source 1..308: mol_type = other DNA; note = MG178-7202 AttB_1
ccgatggcgtccagcgactcggccttggcactgtcgatgaagccacaggtgttgaccaccaccacgtcggcatcctggtaggtcggcacgatctcgtaaccttccatgcgcagctgggtcaggatgcgttcggagtcgacagttgccttcgggcacccaaggctgacgaatccgactttcggggtggcggtggacatgcgggctaacctctaagggcgcctggctggcgcctctgatcaaaaagtgcgcaattctagcgatggatcatacgcttgaccagtgctgtaaaagacgcgcaaacgaaaaag

SEQ ID NO: 7152 - DNA, 308 bp, synthetic construct
  source 1..308: mol_type = other DNA; note = MG178-7202 AttP_1
cagatccgcagggctcacctgcgagcgcgtctatgacggagtgaaggcagtagctgagcaaaaatgaaaaggcccggtgccgtgggggagtccctgcggcaccgggcctttttttgttcctgcgattttagtttagaaaatgtagcctatgggcaccccaaggaaataaaccctacacttggagctttcttagtttgagtagttgtcatcactgatcacgggggaatgcaaaattagcgcgcgagtatacagctatctgaggttttccgatccccggcaggcgaccggcagcagtgccgaccgtcagc

SEQ ID NO: 7153 - DNA, 308 bp, synthetic construct
  source 1..308: mol_type = other DNA; note = MG178-7202 AttL_1
ccgatggcgtccagcgactcggccttggcactgtcgatgaagccacaggtgttgaccaccaccacgtcggcatcctggtaggtcggcacgatctcgtaaccttccatgcgcagctgggtcaggatgcgttcggagtcgacagttgccttcgggcaccccaaggaaataaaccctacacttggagctttcttagtttgagtagttgtcatcactgatcacgggggaatgcaaaattagcgcgcgagtatacagctatctgaggttttccgatccccggcaggcgaccggcagcagtgccgaccgtcagc

SEQ ID NO: 7154 - DNA, 308 bp, synthetic construct
  source 1..308: mol_type = other DNA; note = MG178-7202 AttR_1
cagatccgcagggctcacctgcgagcgcgtctatgacggagtgaaggcagtagctgagcaaaaatgaaaaggcccggtgccgtgggggagtccctgcggcaccgggcctttttttgttcctgcgattttagtttagaaaatgtagcctatgggcacccaaggctgacgaatccgactttcggggtggcggtggacatgcgggctaacctctaagggcgcctggctggcgcctctgatcaaaaagtgcgcaattctagcgatggatcatacgcttgaccagtgctgtaaaagacgcgcaaacgaaaaag

SEQ ID NO: 7155 - DNA, 308 bp, synthetic construct
  source 1..308: mol_type = other DNA; note = MG178-7202 AttB_2
ccgatggcgtccagcgactcggccttggcactgtcgatgaagccacaggtgttgaccaccaccacgtcggcatcctggtaggtcggcacgatctcgtaaccttccatgcgcagctgggtcaggatgcgttcggagtcgacagttgccttcgggcaaccaaggctgacgaatccgactttcggggtggcggtggacatgcgggctaacctctaagggcgcctggctggcgcctctgatcaaaaagtgcgcaattctagcgatggatcatacgcttgaccagtgctgtaaaagacgcgcaaacgaaaaag

SEQ ID NO: 7156 - DNA, 308 bp, synthetic construct
  source 1..308: mol_type = other DNA; note = MG178-7202 AttP_2
cagatccgcagggctcacctgcgagcgcgtctatgacggagtgaaggcagtagctgagcaaaaatgaaaaggcccggtgccgtgggggagtccctgcggcaccgggcctttttttgttcctgcgattttagtttagaaaatgtagcctatgggcaacccaaggaaataaaccctacacttggagctttcttagtttgagtagttgtcatcactgatcacgggggaatgcaaaattagcgcgcgagtatacagctatctgaggttttccgatccccggcaggcgaccggcagcagtgccgaccgtcagc

SEQ ID NO: 7157 - DNA, 308 bp, synthetic construct
  source 1..308: mol_type = other DNA; note = MG178-7202 AttL_2
ccgatggcgtccagcgactcggccttggcactgtcgatgaagccacaggtgttgaccaccaccacgtcggcatcctggtaggtcggcacgatctcgtaaccttccatgcgcagctgggtcaggatgcgttcggagtcgacagttgccttcgggcaacccaaggaaataaaccctacacttggagctttcttagtttgagtagttgtcatcactgatcacgggggaatgcaaaattagcgcgcgagtatacagctatctgaggttttccgatccccggcaggcgaccggcagcagtgccgaccgtcagc

SEQ ID NO: 7158 - DNA, 308 bp, synthetic construct
  source 1..308: mol_type = other DNA; note = MG178-7202 AttR_2
cagatccgcagggctcacctgcgagcgcgtctatgacggagtgaaggcagtagctgagcaaaaatgaaaaggcccggtgccgtgggggagtccctgcggcaccgggcctttttttgttcctgcgattttagtttagaaaatgtagcctatgggcaaccaaggctgacgaatccgactttcggggtggcggtggacatgcgggctaacctctaagggcgcctggctggcgcctctgatcaaaaagtgcgcaattctagcgatggatcatacgcttgaccagtgctgtaaaagacgcgcaaacgaaaaag

SEQ ID NO: 7159 - DNA, 312 bp, synthetic construct
  source 1..312: mol_type = other DNA; note = MG178-7193 AttB
cacgtaacatgtaacagccgttttgactggattgacgggccttggccatgggaaggaggaatggaataatgtgggtttatgaaaaaagacttcaatttccggtaaacatcaagcggcccgacccgaaggcggcacagataatcatcagccagtatggtggaccggacggtgaaatgggtgccagcatgcgttacctctcacagcgctattcaatgcctgacaataaagttgccggactgcttacggatatcggcaccgaagagctggcgcatcttgagatagttgccacaatggttcaccagcttaccagaa

SEQ ID NO: 7160 - DNA, 312 bp, synthetic construct
  source 1..312: mol_type = other DNA; note = MG178-7193 AttP
cgataaacttaccaaagctaatgctatccggtccattgttgaccactgcgtctatgacaaagcaaacgacagttttgatatatttttctttttttctaaaggctccgaacccctataaaataaggccttatcataattataccttacggaagtatggtggactattcttccgtaaggtataatatcatcacaaagcctttatttaaagcaattacaggctttttacgtccacccagaagcttacctgtcccggctttcctacgcgggatgccttattggtcatcctgattctgccattgacaatctcatctg

SEQ ID NO: 7161 - DNA, 312 bp, synthetic construct
  source 1..312: mol_type = other DNA; note = MG178-7193 AttL
cacgtaacatgtaacagccgttttgactggattgacgggccttggccatgggaaggaggaatggaataatgtgggtttatgaaaaaagacttcaatttccggtaaacatcaagcggcccgacccgaaggcggcacagataatcatcagccagtatggtggactattcttccgtaaggtataatatcatcacaaagcctttatttaaagcaattacaggctttttacgtccacccagaagcttacctgtcccggctttcctacgcgggatgccttattggtcatcctgattctgccattgacaatctcatctg

SEQ ID NO: 7162 - DNA, 312 bp, synthetic construct
  source 1..312: mol_type = other DNA; note = MG178-7193 AttR
cgataaacttaccaaagctaatgctatccggtccattgttgaccactgcgtctatgacaaagcaaacgacagttttgatatatttttctttttttctaaaggctccgaacccctataaaataaggccttatcataattataccttacggaagtatggtggaccggacggtgaaatgggtgccagcatgcgttacctctcacagcgctattcaatgcctgacaataaagttgccggactgcttacggatatcggcaccgaagagctggcgcatcttgagatagttgccacaatggttcaccagcttaccagaa

SEQ ID NO: 7163 - DNA, 307 bp, synthetic construct
  source 1..307: mol_type = other DNA; note = MG178-7177 AttB
ttgcgcagaaaggtacacctcctgcagcctgcggccatactccaaccgtatgatcaacataatatgcctcaaacggagttccttttatctgttccattgtaagatttcttgtaagctgatgaaccattgtactgaccatttcaagatggccaagttcttccgtgcctatatcagtcagcaatccggcaacctccctgtatggcatggaatatctctgtgaaaggtatctcattgatgctccaagctcaccatctggtccaccatactgcgaaataatcattgctgccagcgtaggattacaattctt

SEQ ID NO: 7164 - DNA, 307 bp, synthetic construct
  source 1..307: mol_type = other DNA; note = MG178-7177 AttP
tgctccgtgtaaaaacatgctgttaaaatcttgcattgataaaattgtatatcacaatgacagtgaatcaaaagctggtataggcaggtacgttgataatccgttcaagcttgatattttcttgcgcctttgatttccaacatcaaggtgcaagttcattagctcatggttgttggatatgaatttaactttaatatgtaaagaatctcttcttatttatatatagtttaatattaaccatgaaggggtagtttaacctattcctttatggttaatttatatgttcttcctgatttttctctaataa

SEQ ID NO: 7165 - DNA, 307 bp, synthetic construct
  source 1..307: mol_type = other DNA; note = MG178-7177 AttL
ttgcgcagaaaggtacacctcctgcagcctgcggccatactccaaccgtatgatcaacataatatgcctcaaacggagttccttttatctgttccattgtaagatttcttgtaagctgatgaaccattgtactgaccatttcaagatggccaagttcattagctcatggttgttggatatgaatttaactttaatatgtaaagaatctcttcttatttatatatagtttaatattaaccatgaaggggtagtttaacctattcctttatggttaatttatatgttcttcctgatttttctctaataa

SEQ ID NO: 7166 - DNA, 307 bp, synthetic construct
  source 1..307: mol_type = other DNA; note = MG178-7177 AttR
tgctccgtgtaaaaacatgctgttaaaatcttgcattgataaaattgtatatcacaatgacagtgaatcaaaagctggtataggcaggtacgttgataatccgttcaagcttgatattttcttgcgcctttgatttccaacatcaaggtgcaagttcttccgtgcctatatcagtcagcaatccggcaacctccctgtatggcatggaatatctctgtgaaaggtatctcattgatgctccaagctcaccatctggtccaccatactgcgaaataatcattgctgccagcgtaggattacaattctt

SEQ ID NO: 7167 - DNA, 314 bp, synthetic construct
  source 1..314: mol_type = other DNA; note = MG178-1859 AttB
aactcgccgattttgccgagaaccttgtcttccgccgtttcacggacacagcatgtattcatcaaaataacatcggccagttccgcatcctccgtcatcgtatagccgagctcttcaagctgtccggcataacgctccgaatcggacgaattcatttgacatccgtatgtaatgagacaatactgtttattggtcagcaaatccatttctatatacactccgtttattacaacataaagttcggttttacattttataataccatatacggcgtatattcaccagcacagacaacaactctcaaaattagatgc

SEQ ID NO: 7168 - DNA, 314 bp, synthetic construct
  source 1..314: mol_type = other DNA; note = MG178-1859 AttP
ttgccggcagacgggtacaatccattacattcgccaacggcgtcactcatacattcacatattaattatatcccgtcataaaaggcgggatatttttttgtaaaaaaataaacggcgccattgcgccgttcttttcatctgatttaattgttcatttgacatccatatgtaattataaatgcgaatttctgtttatgcatagatatcctctcgttggtattttatactatataatatcatatcaaccacatagaaaacaggctggataaccaacatctttatatccagcctgttcttttttaataagttgttta

SEQ ID NO: 7169 - DNA, 314 bp, synthetic construct
  source 1..314: mol_type = other DNA; note = MG178-1859 AttL
aactcgccgattttgccgagaaccttgtcttccgccgtttcacggacacagcatgtattcatcaaaataacatcggccagttccgcatcctccgtcatcgtatagccgagctcttcaagctgtccggcataacgctccgaatcggacgaattcatttgacatccatatgtaattataaatgcgaatttctgtttatgcatagatatcctctcgttggtattttatactatataatatcatatcaaccacatagaaaacaggctggataaccaacatctttatatccagcctgttcttttttaataagttgttta

SEQ ID NO: 7170 - DNA, 314 bp, synthetic construct
  source 1..314: mol_type = other DNA; note = MG178-1859 AttR
ttgccggcagacgggtacaatccattacattcgccaacggcgtcactcatacattcacatattaattatatcccgtcataaaaggcgggatatttttttgtaaaaaaataaacggcgccattgcgccgttcttttcatctgatttaattgttcatttgacatccgtatgtaatgagacaatactgtttattggtcagcaaatccatttctatatacactccgtttattacaacataaagttcggttttacattttataataccatatacggcgtatattcaccagcacagacaacaactctcaaaattagatgc

SEQ ID NO: 7171 - DNA, 306 bp, synthetic construct
  source 1..306: mol_type = other DNA; note = MG178-7201 AttB
tcgggtcagctgatagaggagcgccgagatcatctcgacatgcgcaagctcttcagtcccgacgtctgtaaggatccctatcagctccccgtagggcatcgaatagcgctgctgaagatagcgggtagccgctccgagctcgccatgcggaccgccgagctggctaataatgatcgaagcgctcatcgggtcgggcttttggacgctgaccgggtggatcagccgtttatcatagttccacattttcttccctccttacgcttcgctctgccacggccagggcgttcggacgtaatcccaacaatc

SEQ ID NO: 7172 - DNA, 306 bp, synthetic construct
  source 1..306: mol_type = other DNA; note = MG178-7201 AttP
gcttcttcaggatgaaaaagcctctgacgccgaaaagaacgaggctttgcaccatatcgttgataaaatcgtctttcaacgaagcaccaatcactttgatgttttttactcggaaagctatatgctttagtataacttaatgtgattagcaccgccaaatatctttaagttatactactgacaaacagcatttttctcaaaatgcccctatcaccaagcaggcactatatgaattcctttcttgccataatggatttttatccggtttgtctttttagaccctccttttagatttttcgcctcgcc

SEQ ID NO: 7173 - DNA, 306 bp, synthetic construct
  source 1..306: mol_type = other DNA; note = MG178-7201 AttL
tcgggtcagctgatagaggagcgccgagatcatctcgacatgcgcaagctcttcagtcccgacgtctgtaaggatccctatcagctccccgtagggcatcgaatagcgctgctgaagatagcgggtagccgctccgagctcgccatgcggaccgccaaatatctttaagttatactactgacaaacagcatttttctcaaaatgcccctatcaccaagcaggcactatatgaattcctttcttgccataatggatttttatccggtttgtctttttagaccctccttttagatttttcgcctcgcc

SEQ ID NO: 7174 - DNA, 306 bp, synthetic construct
  source 1..306: mol_type = other DNA; note = MG178-7201 AttR
gcttcttcaggatgaaaaagcctctgacgccgaaaagaacgaggctttgcaccatatcgttgataaaatcgtctttcaacgaagcaccaatcactttgatgttttttactcggaaagctatatgctttagtataacttaatgtgattagcaccgccgagctggctaataatgatcgaagcgctcatcgggtcgggcttttggacgctgaccgggtggatcagccgtttatcatagttccacattttcttccctccttacgcttcgctctgccacggccagggcgttcggacgtaatcccaacaatc

SEQ ID NO: 7175 - DNA, 307 bp, synthetic construct
  source 1..307: mol_type = other DNA; note = MG178-7173 AttB
ccgcttttgtcaccccctgctcgtagggaagcggccagtcatagccgtagttggggattcccaggctgatcttttccgccggtatttccgtcagggcgtactctgccacgcgtctgaccatattgatcggggccactgccatgggcgggccatatgtgtatccccattcatacgtcatcagcagaacccggttggccgcctctccgagcaggcggtaatcgattccttcgtaaagcagccccctctggtctctggccgtcttaggagccagtgcaacgctcacctgatagccgaacaggttcatcac

SEQ ID NO: 7176 - DNA, 307 bp, synthetic construct
  source 1..307: mol_type = other DNA; note = MG178-7173 AttP
tggagaaagttgattatctaaaaaccgagagaaacaaaaaaggcggaaagggaaatgctaatttctctatttatttttatccacgcgtcccgaaatactgaaattatgtatactttttcggggcgcataattacctatgatttatcggcgcatatgtataagcgccaacaatcatatggtatcaaattataaaggaaagaagggggaaaaatggacagaacagacgaattattttttgagatgattgaagcctatcagcggcacgcccagactgccagacacgcaaagttcaaggagactcgcgaga

SEQ ID NO: 7177 - DNA, 307 bp, synthetic construct
  source 1..307: mol_type = other DNA; note = MG178-7173 AttL
ccgcttttgtcaccccctgctcgtagggaagcggccagtcatagccgtagttggggattcccaggctgatcttttccgccggtatttccgtcagggcgtactctgccacgcgtctgaccatattgatcggggccactgccatgggcgggccatatgtataagcgccaacaatcatatggtatcaaattataaaggaaagaagggggaaaaatggacagaacagacgaattattttttgagatgattgaagcctatcagcggcacgcccagactgccagacacgcaaagttcaaggagactcgcgaga

SEQ ID NO: 7178 - DNA, 307 bp, synthetic construct
  source 1..307: mol_type = other DNA; note = MG178-7173 AttR
tggagaaagttgattatctaaaaaccgagagaaacaaaaaaggcggaaagggaaatgctaatttctctatttatttttatccacgcgtcccgaaatactgaaattatgtatactttttcggggcgcataattacctatgatttatcggcgcatatgtgtatccccattcatacgtcatcagcagaacccggttggccgcctctccgagcaggcggtaatcgattccttcgtaaagcagccccctctggtctctggccgtcttaggagccagtgcaacgctcacctgatagccgaacaggttcatcac

SEQ ID NO: 7179 - DNA, 322 bp, synthetic construct
  source 1..322: mol_type = other DNA; note = MG178-7198 AttB
aaaactctctattggtttttccttaggtcggcgacgaccaactgatagcccatgacacctcagtcaatctaatttgttctctctgctgttattcggaacaacgatgaaaacacgcaaaaaagacttatcgtctgttgacgataagttcttaactggttgcgggagctggatttgaaccaacgaccttcgggttatgagcccgacgagctaccaaactgctccatcccgcgatatttatttttcagtgcctaattataataccatatttgctttacaaatgcaagcccttttttcaaaaaaatataacaaataattagaggaa

SEQ ID NO: 7180 - DNA, 322 bp, synthetic construct
  source 1..322: mol_type = other DNA; note = MG178-7198 AttP
agattttacagtagagcagattcattcatggctggaagcgctgaaagccgccccggatgataaagctgttcgccttttggtttctcgtattgaggtaaaacaaaagaccgtcttcaacatagcaagtacattgaaagcggtcttatgtgaaactggttgcgggagctggattgatatattaccaagaatcctaatgaattacccccagcagaacgagatttaacaaccagaatcagacatattttctggaagttcgacccctccttccccaataaattcttctattgcatcataaagagctatagacaaagggtcagcggcg

SEQ ID NO: 7181 - DNA, 322 bp, synthetic construct
  source 1..322: mol_type = other DNA; note = MG178-7198 AttL
aaaactctctattggtttttccttaggtcggcgacgaccaactgatagcccatgacacctcagtcaatctaatttgttctctctgctgttattcggaacaacgatgaaaacacgcaaaaaagacttatcgtctgttgacgataagttcttaactggttgcgggagctggattgatatattaccaagaatcctaatgaattacccccagcagaacgagatttaacaaccagaatcagacatattttctggaagttcgacccctccttccccaataaattcttctattgcatcataaagagctatagacaaagggtcagcggcg

SEQ ID NO: 7182 - DNA, 322 bp, synthetic construct
  source 1..322: mol_type = other DNA; note = MG178-7198 AttR
agattttacagtagagcagattcattcatggctggaagcgctgaaagccgccccggatgataaagctgttcgccttttggtttctcgtattgaggtaaaacaaaagaccgtcttcaacatagcaagtacattgaaagcggtcttatgtgaaactggttgcgggagctggatttgaaccaacgaccttcgggttatgagcccgacgagctaccaaactgctccatcccgcgatatttatttttcagtgcctaattataataccatatttgctttacaaatgcaagcccttttttcaaaaaaatataacaaataattagaggaa

SEQ ID NO: 7183 - DNA, 108 bp, synthetic construct
  source 1..108: mol_type = other DNA; note = MG178-7202 large serine recombinase attp_1
accgggcctttttttgttcctgcgattttagtttagaaaatgtagcctatgggcaccccaaggaaataaaccctacacttggagctttcttagtttgagtagttgtca

SEQ ID NO: 7184 - DNA, 88 bp, synthetic construct
  source 1..88: mol_type = other DNA; note = MG178-7202 large serine recombinase attp_2
tttttgttcctgcgattttagtttagaaaatgtagcctatgggcaccccaaggaaataaaccctacacttggagctttcttagtttga

SEQ ID NO: 7185 - DNA, 68 bp, synthetic construct
  source 1..68: mol_type = other DNA; note = MG178-7202 large serine recombinase attp_3
tgcgattttagtttagaaaatgtagcctatgggcaccccaaggaaataaaccctacacttggagcttt

SEQ ID NO: 7186 - DNA, 58 bp, synthetic construct
  source 1..58: mol_type = other DNA; note = MG178-7202 large serine recombinase attp_4
ttttagtttagaaaatgtagcctatgggcaccccaaggaaataaaccctacacttgga

SEQ ID NO: 7187 - DNA, 48 bp, synthetic construct
  source 1..48: mol_type = other DNA; note = MG178-7202 large serine recombinase attp_5
gtttagaaaatgtagcctatgggcaccccaaggaaataaaccctacac

SEQ ID NO: 7188 - DNA, 108 bp, synthetic construct
  source 1..108: mol_type = other DNA; note = MG178-7202 large serine recombinase attB_1
cttccatgcgcagctgggtcaggatgcgttcggagtcgacagttgccttcgggcacccaaggctgacgaatccgactttcggggtggcggtggacatgcgggctaacc

SEQ ID NO: 7189 - DNA, 88 bp, synthetic construct
  source 1..88: mol_type = other DNA; note = MG178-7202 large serine recombinase attB_2
cagctgggtcaggatgcgttcggagtcgacagttgccttcgggcacccaaggctgacgaatccgactttcggggtggcggtggacatg

SEQ ID NO: 7190 - DNA, 68 bp, synthetic construct
  source 1..68: mol_type = other DNA; note = MG178-7202 large serine recombinase attB_3
aggatgcgttcggagtcgacagttgccttcgggcacccaaggctgacgaatccgactttcggggtggc

SEQ ID NO: 7191 - DNA, 58 bp, synthetic construct
  source 1..58: mol_type = other DNA; note = MG178-7202 large serine recombinase attB_4
gcgttcggagtcgacagttgccttcgggcacccaaggctgacgaatccgactttcggg

SEQ ID NO: 7192 - DNA, 48 bp, synthetic construct
  source 1..48: mol_type = other DNA; note = MG178-7202 large serine recombinase attB_5
cggagtcgacagttgccttcgggcacccaaggctgacgaatccgactt

SEQ ID NO: 7193 - DNA, 46 bp, synthetic construct
  source 1..46: mol_type = other DNA; note = MG178-7202 large serine recombinase attB_6
ggagtcgacagttgccttcgggcacccaaggctgacgaatccgact

SEQ ID NO: 7194 - DNA, 44 bp, synthetic construct
  source 1..44: mol_type = other DNA; note = MG178-7202 large serine recombinase attB_7
gagtcgacagttgccttcgggcacccaaggctgacgaatccgac

SEQ ID NO: 7195 - DNA, 42 bp, synthetic construct
  source 1..42: mol_type = other DNA; note = MG178-7202 large serine recombinase attB_8
agtcgacagttgccttcgggcacccaaggctgacgaatccga

SEQ ID NO: 7196 - DNA, 40 bp, synthetic construct
  source 1..40: mol_type = other DNA; note = MG178-7202 large serine recombinase attB_9
gtcgacagttgccttcgggcacccaaggctgacgaatccg

SEQ ID NO: 7197 - DNA, 38 bp, synthetic construct
  source 1..38: mol_type = other DNA; note = MG178-7202 large serine recombinase attB_10
tcgacagttgccttcgggcacccaaggctgacgaatcc

SEQ ID NO: 7198 - DNA, 36 bp, synthetic construct
  source 1..36: mol_type = other DNA; note = MG178-7202 large serine recombinase attB_11
cgacagttgccttcgggcacccaaggctgacgaatc

SEQ ID NO: 7199 - DNA, 32 bp, synthetic construct
  source 1..32: mol_type = other DNA; note = MG178-7202 large serine recombinase attB_12
acagttgccttcgggcacccaaggctgacgaa

SEQ ID NO: 7200 - DNA, 28 bp, synthetic construct
  source 1..28: mol_type = other DNA; note = MG178-7202 large serine recombinase attB_13
agttgccttcgggcacccaaggctgacg

SEQ ID NO: 7201 - DNA, 112 bp, synthetic construct
  source 1..112: mol_type = other DNA; note = MG178-7193 large serine recombinase attp_1
ggctccgaacccctataaaataaggccttatcataattataccttacggaagtatggtggactattcttccgtaaggtataatatcatcacaaagcctttatttaaagcaat

SEQ ID NO: 7202 - DNA, 92 bp, synthetic construct
  source 1..92: mol_type = other DNA; note = MG178-7193 large serine recombinase attp_2
ccctataaaataaggccttatcataattataccttacggaagtatggtggactattcttccgtaaggtataatatcatcacaaagcctttat

SEQ ID NO: 7203 - DNA, 72 bp, synthetic construct
  source 1..72: mol_type = other DNA; note = MG178-7193 large serine recombinase attp_3
taaggccttatcataattataccttacggaagtatggtggactattcttccgtaaggtataatatcatcaca

SEQ ID NO: 7204 - DNA, 62 bp, synthetic construct
  source 1..62: mol_type = other DNA; note = MG178-7193 large serine recombinase attp_4
ccttatcataattataccttacggaagtatggtggactattcttccgtaaggtataatatca

SEQ ID NO: 7205 - DNA, 52 bp, synthetic construct
  source 1..52: mol_type = other DNA; note = MG178-7193 large serine recombinase attp_5
tcataattataccttacggaagtatggtggactattcttccgtaaggtataa

SEQ ID NO: 7206 - DNA, 112 bp, synthetic construct
  source 1..112: mol_type = other DNA; note = MG178-7193 large serine recombinase attB_1
ggtaaacatcaagcggcccgacccgaaggcggcacagataatcatcagccagtatggtggaccggacggtgaaatgggtgccagcatgcgttacctctcacagcgctattca

SEQ ID NO: 7207 - DNA, 92 bp, synthetic construct
  source 1..92: mol_type = other DNA; note = MG178-7193 large serine recombinase attB_2
aagcggcccgacccgaaggcggcacagataatcatcagccagtatggtggaccggacggtgaaatgggtgccagcatgcgttacctctcaca

SEQ ID NO: 7208 - DNA, 72 bp, synthetic construct
  source 1..72: mol_type = other DNA; note = MG178-7193 large serine recombinase attB_3
acccgaaggcggcacagataatcatcagccagtatggtggaccggacggtgaaatgggtgccagcatgcgtt

SEQ ID NO: 7209 - DNA, 62 bp, synthetic construct
  source 1..62: mol_type = other DNA; note = MG178-7193 large serine recombinase attB_4
aaggcggcacagataatcatcagccagtatggtggaccggacggtgaaatgggtgccagcat

SEQ ID NO: 7210 - DNA, 52 bp, synthetic construct
  source 1..52: mol_type = other DNA; note = MG178-7193 large serine recombinase attB_5
ggcacagataatcatcagccagtatggtggaccggacggtgaaatgggtgcc

SEQ ID NO: 7211 - protein, 673 aa, unidentified
  source 1..673: note = MG178-7205 large serine recombinase
MAKRELMKNLMSDTFRRVAIYIRVSTNHQVDKDSLPLQREELINYCKYVLGIEDFEIFEDAGFSAKNTDRPGYQKMMKMVRAGLFTHVLVWKLDRISRNLLDFAYMYEELKKLDVAFISKNEQFDTSTAMGEAMLKIILVFAELERKTTSERVAATMISRAVNGKWNGGRVPYGYSYDYEQKEFSVNPEEQKVALLMCDLYEASNSLLFVSRKLNEIGYRSRAGNLWSPVQVRKVLVNPFNTGKYVYNQTSLSTGTQLPNKEEDFIVIEDHHPALIPQERQDRLIARLNRNARSRSTANNTTNRKNIHVFSGLIYCDNCGNMLTSSVGKKLAGDGWRPSIYLCPSKRKHVSDGCHDTTDSSVGEFVLNFIMNMLNAQRNFQLVRSAADLQRLLLYGKVFDDVDHLDQDSLNDMFTVLSSNLPQNVKAGMKKKMRKPPSNPEVTKLNKEKQRLERAMERLKRLYMYSDDSMTEQEYITEKNRIADAYSEAEARIVEITNYERMERSISDEDFVRQATAFILSKKLSGSSYINYRKLAVSTDPLMLKEFFNSILDSITINTDGKVGSIVFKNGLRHQFIYTSNKKEDKTMLAKCNYCGQVMLEADGCTKTYFTLNGKQYPRIRVGDKYDFEPGTTSRCHDCAAKPGEYHHSGCDAERCPVCHEQLIGCECDFSDL

SEQ ID NO: 7212 - protein, 564 aa, unidentified
  source 1..564: note = MG178-7206 large serine recombinase
MPRAQKAAIYCRVSTLHQVDKDSLPMQRQDMINYAKYALGIEDYEVFEDAGYSGKNTDRPAFQDMMERIEAGEFSHVLVWKIDRISRNLLDFATMYAKCKKLGVTFVSKNEQFDTSTAMGEAMLKIILVFAELERNMTSERVSSTMNARAAEGKWNGGRVPFAYRYDRETDSFSIRDDEAKVALELKDIYLRTRSLTYTARTLNEAGKRTRRGYAWTPATVAIILRSPFYRGTYRYNYRDESETTFSFKGQNDWIMCAKHHPPLFSEADCRQIDFWLTKNRRQHGKATHVQRKLVHVFAGLIRCGFCGSNYIASIDRVRASGYQPSMYNCGGRRQKGMCKNRYVTDIRIGGFVFNYISNVIRLRDAFRPQWSKARIQRLLLRGDDFQCVSLSDDTLRRVRAALLGSRLSTAEYQPADEQNDDSAEQTRKSNLQAELEKNRRALSRLMHLFLYAEDEMPQADFLREKKHLQDTITRLQAELEKAQQSSVFASSLTDEEFLGKAAHLLFQSAMVRGGIDFPELAMRVGNLELKNFVNAVIKQIIVLDGRVTQITFANDEIHTFLYH

SEQ ID NO: 7213 - protein, 541 aa, unidentified
  source 1..541: note = MG178-7207 large serine recombinase
MEEIKCAIYTRKSTDEGLEKEFNTLEAQREAGENYVKSQKHQGWILVDEHYDDGGFSGGNMKRPALQRLFKDIELGKINMIVVYKIDRLTRSLVDFSKMVDIFDKYHCSFVSVTQNFNTSDSMGRLTLNMLLSFAQFEREIGSERVRDKTAASRKKGMWTGGTVPFGYRSVNKKLEIEPNEAEAVKFMFEMYIKYKSAMAVCKLLTEKGYRAFRRDAVLRMLKNPIYEGKIKYKHELYDGQHQAIIRQKTFEAVQYILLNKDKRERTCLFNRNEVGILRGLLICGCCHAPMTPASCQSHGVRRYYYTSTKAKYYGYHHCSNGAVPVALMDECMTKIVTPLISDINVLNGLINKICPDKSAEIYKVMRNPEKIIERMTERDKLQLMKLLIKKIIVNYDTIEINWSDLALSLLPAYLRARTQNQITIIDYPFKRNKGALTLSLPEEVAPNINYNAELITALCKAFKYQKIMNKEKQSIIELAANENIDSGYLGRLIRLTCLAPDIIKRILEGTQPTTIYLKRLLREDIPPIWQDQRIKYGFVK

SEQ ID NO: 7214 - protein, 521 aa, unidentified
  source 1..521: note = MG178-7208 large serine recombinase
MIAIYARQSIEKKDSVSIEAQIEKCKYYCENQDYKIYKDAGYSGKNINRPQFSKLLEDIKSGLITKVIAYRLDRISRSIADFSQLLILFDEHNVDFVSATENFDTNTPMGRAMINIVMTFAQLERETIVERVTDNYYFRANNGYWAGGYAPYGYEIKHIIGNDGKRHSVLVENKDESKIVKEIYDMYINQNISMRKIAQQLNYQNIPTKKQSGNWGINAVNAILSRPIYTEATTKIYDYFNKRGTCITNNIEHFDGTKTANLYGNSKKNNNVKALRNYDEMFLSLINCVPLISNEDWFKVQNIKGTKKNLPPRTNSSKISFLCGLVKCGKCSSNMVTQGCKNRYGIQYYYLICSTKRNLGRIKCDNKMIDISKLEDIVINDIKKHFNSNEIETKIEKYMKNNKKENINLLKQKEEFENKIIKIDIQIQNLINSIAEGNITISKYINQKIEVLEKEKQNISSQLSTIIEKNNITQDNYLIEYVKNINEKINTKDFEQLKLLCHTIIDKIVITDKNIDIHYKI

SEQ ID NO: 7215 - DNA, 325 bp, synthetic construct; identical to SEQ ID NO: 7061
  source 1..325: mol_type = other DNA; note = MG178-7163 AttB

SEQ ID NO: 7216 - DNA, 325 bp, synthetic construct; identical to SEQ ID NO: 7063
  source 1..325: mol_type = other DNA; note = MG178-7163 AttL

SEQ ID NO: 7217 - DNA, 325 bp, synthetic construct; identical to SEQ ID NO: 7062
  source 1..325: mol_type = other DNA; note = MG178-7163 AttP

SEQ ID NO: 7218 - DNA, 325 bp, synthetic construct; identical to SEQ ID NO: 7064
  source 1..325: mol_type = other DNA; note = MG178-7163 AttR

SEQ ID NO: 7219 - DNA, 25 bp, synthetic construct
  source 1..25: mol_type = other DNA; note = MG178-7163 Core
gatgcgatgtttatgcgatagcatc

SEQ ID NO: 7220 - DNA, 312 bp, synthetic construct; identical to SEQ ID NO: 7065
  source 1..312: mol_type = other DNA; note = MG178-7205 AttB

SEQ ID NO: 7221 - DNA, 312 bp, synthetic construct; identical to SEQ ID NO: 7067
  source 1..312: mol_type = other DNA; note = MG178-7205 AttL

SEQ ID NO: 7222 - DNA, 312 bp, synthetic construct; identical to SEQ ID NO: 7066
  source 1..312: mol_type = other DNA; note = MG178-7205 AttP

SEQ ID NO: 7223 - DNA, 312 bp, synthetic construct; identical to SEQ ID NO: 7068
  source 1..312: mol_type = other DNA; note = MG178-7205 AttR

SEQ ID NO: 7224 - DNA, 12 bp, synthetic construct
  source 1..12: mol_type = other DNA; note = MG178-7205 Core
ggggatgctatg

SEQ ID NO: 7225 - DNA, 317 bp, synthetic construct; identical to SEQ ID NO: 7073
  source 1..317: mol_type = other DNA; note = MG178-7165 AttB 1

SEQ ID NO: 7226 - DNA, 317 bp, synthetic construct; identical to SEQ ID NO: 7077
  source 1..317: mol_type = other DNA; note = MG178-7165 AttB 2

SEQ ID NO: 7227 - DNA, 317 bp, synthetic construct; identical to SEQ ID NO: 7075
  source 1..317: mol_type = other DNA; note = MG178-7165 AttL

SEQ ID NO: 7228 - DNA, 317 bp, synthetic construct; identical to SEQ ID NO: 7074
  source 1..317: mol_type = other DNA; note = MG178-7165 AttP 1

SEQ ID NO: 7229 - DNA, 317 bp, synthetic construct; identical to SEQ ID NO: 7078
  source 1..317: mol_type = other DNA; note = MG178-7165 AttP 2

SEQ ID NO: 7230 - DNA, 317 bp, synthetic construct; identical to SEQ ID NO: 7076
  source 1..317: mol_type = other DNA; note = MG178-7165 AttR

SEQ ID NO: 7231 - DNA, 17 bp, synthetic construct
  source 1..17: mol_type = other DNA; note = MG178-7165 Core 1
ggagatgccatgttcat

SEQ ID NO: 7232 - DNA, 17 bp, synthetic construct
  source 1..17: mol_type = other DNA; note = MG178-7165 Core 2
ggagatgcgatgttcat

SEQ ID NO: 7233 - DNA, 338 bp, synthetic construct; identical to SEQ ID NO: 7081
  source 1..338: mol_type = other DNA; note = MG178-7206 AttB

SEQ ID NO: 7234 - DNA, 338 bp, synthetic construct; identical to SEQ ID NO: 7083
  source 1..338: mol_type = other DNA; note = MG178-7206 AttL

SEQ ID NO: 7235 - DNA, 338 bp, synthetic construct; identical to SEQ ID NO: 7082
  source 1..338: mol_type = other DNA; note = MG178-7206 AttP

SEQ ID NO: 7236 - DNA, 338 bp, synthetic construct; identical to SEQ ID NO: 7084
  source 1..338: mol_type = other DNA; note = MG178-7206 AttR

SEQ ID NO: 7237 - DNA, 38 bp, synthetic construct
  source 1..38: mol_type = other DNA; note = MG178-7206 Core
gaagaactcaaggagcttgaggagctcgaccgccagcg

SEQ ID NO: 7238 - DNA, 135 bp, synthetic construct
  source 1..135: mol_type = other DNA; note = MG178-7208 AttB
tccattcgtattatatggcataggctctgcttcgcctctataatatgtttccattctatctgtatcattattaaaactaatatttttgccaagaaaaatccccctcatataataattttattttattatatgaaa

SEQ ID NO: 7239 - DNA, 316 bp, synthetic construct; identical to SEQ ID NO: 7087
  source 1..316: mol_type = other DNA; note = MG178-7208 AttL

SEQ ID NO: 7240 - DNA, 136 bp, synthetic construct
  source 1..136: mol_type = other DNA; note = MG178-7208 AttP
ataaccgataaaaatatagatatacactacaagatttagtgtatgtctttttgaatttaatgtatcattattaaaatcaaaatggcatactatttgttgtaataattaaaacattcaatcatgccttttctatata

SEQ ID NO: 7241 - DNA, 316 bp, synthetic construct; identical to SEQ ID NO: 7088
  source 1..316: mol_type = other DNA; note = MG178-7208 AttR

SEQ ID NO: 7242 - DNA, 16 bp, synthetic construct
  source 1..16: mol_type = other DNA; note = MG178-7208 Core
tgtatcattattaaaa

SEQ ID NO: 7243 - DNA, 309 bp, synthetic construct; identical to SEQ ID NO: 7089
  source 1..309: mol_type = other DNA; note = MG178-7207 AttB

SEQ ID NO: 7244 - DNA, 309 bp, synthetic construct; identical to SEQ ID NO: 7091
  source 1..309: mol_type = other DNA; note = MG178-7207 AttL

SEQ ID NO: 7245 - DNA, 309 bp, synthetic construct; identical to SEQ ID NO: 7090
  source 1..309: mol_type = other DNA; note = MG178-7207 AttP

SEQ ID NO: 7246 - DNA, 309 bp, synthetic construct; identical to SEQ ID NO: 7092
  source 1..309: mol_type = other DNA; note = MG178-7207 AttR

SEQ ID NO: 7247 - skipped

SEQ ID NO: 7248 - DNA, 314 bp, synthetic construct
  source 1..314: mol_type = other DNA; note = MG178-7169 AttB
gggctccaacggcccatttccttatcacgccgatgttcctcctcgtgcagctctttccggtgcgcttggcggcagaagccgccaggcacgacgcatccgtgcgcccaacaaaaaagcctcacgaggaggctttcttgcatcaagaaagatctggtagcgggggcaggattcgaacctgcgaccttcgggttatgagcccgacgagctgccagactgctccaccccgcatcagagtccgaagagtttaccggggtggccggtttcttgcaagcctcaatcgttcatcaatggcatccatcgaccattcagagacc

SEQ ID NO: 7249 - DNA, 314 bp, synthetic construct
  source 1..314: mol_type = other DNA; note = MG178-7169 AttL
gggctccaacggcccatttccttatcacgccgatgttcctcctcgtgcagctctttccggtgcgcttggcggcagaagccgccaggcacgacgcatccgtgcgcccaacaaaaaagcctcacgaggaggctttcttgcatcaagaaagatctggtagcgggggcgcgatgcggtctctatcttacagagccctaccgcgtgcctctctcccggccagagtccgaggattgtacggcaaagcgccgccgctgacaacacgtagcgatatccattctatgcatcgcacggtgagacaggctgcctgtacgcttgat

SEQ ID NO: 7250 - DNA, 314 bp, synthetic construct
  source 1..314: mol_type = other DNA; note = MG178-7169 AttP
tggaacaacgttgtcgcccgcctcaccgacacccgcgacatccccgccgcccgcgacgccctgcgcgaactcatcggcaaccgcgtaaccgtcaaaaacgaaaacggcgaactcttcgcagagatcgccgcatcggaatgtcagataaagctggtagcgggggcgcgatgcggtctctatcttacagagccctaccgcgtgcctctctcccggccagagtccgaggattgtacggcaaagcgccgccgctgacaacacgtagcgatatccattctatgcatcgcacggtgagacaggctgcctgtacgcttgat

SEQ ID NO: 7251 - DNA, 314 bp, synthetic construct
  source 1..314: mol_type = other DNA; note = MG178-7169 AttR
tggaacaacgttgtcgcccgcctcaccgacacccgcgacatccccgccgcccgcgacgccctgcgcgaactcatcggcaaccgcgtaaccgtcaaaaacgaaaacggcgaactcttcgcagagatcgccgcatcggaatgtcagataaagctggtagcgggggcaggattcgaacctgcgaccttcgggttatgagcccgacgagctgccagactgctccaccccgcatcagagtccgaagagtttaccggggtggccggtttcttgcaagcctcaatcgttcatcaatggcatccatcgaccattcagagacc

SEQ ID NO: 7252 - DNA, 14 bp, synthetic construct
  source 1..14: mol_type = other DNA; note = MG178-7169 Core
ctggtagcgggggc

SEQ ID NO: 7253 - DNA, 308 bp, synthetic construct
  source 1..308: mol_type = other DNA; note = MG178-7170 AttB
gtggcagtccaaggatttcctgttgcatccacatagtaaagggcattgtcatggtcggcataatgcccgcccaggcctgcccgctccatctcttccgcagaggcccctttcgtcagtttatagaccaaagtggcaattatttctaaatgagccatttcctcagtccctatatccgtcagtatggccttggttacattggtaggcatactgtaccgttgatttaaatagcgtaatgcagctgacagctccccatccggcccgccatattgagtgatcaagtatttggccattctgagatcgggtttgct

SEQ ID NO: 7254 - DNA, 308 bp, synthetic construct
  source 1..308: mol_type = other DNA; note = MG178-7170 AttL
gtggcagtccaaggatttcctgttgcatccacatagtaaagggcattgtcatggtcggcataatgcccgcccaggcctgcccgctccatctcttccgcagaggcccctttcgtcagtttatagaccaaagtggcaattatttctaaatgagccatttcttttgcaccataaggttatctataaaaaacaacccagattcaggggttgtttttttcgtattcatccaggtacttttccacaatatacctcaattgctccgaattactccggtgctccctggctgcaactttagtaaacctctcataaag

SEQ ID NO: 7255 - DNA, 308 bp, synthetic construct
  source 1..308: mol_type = other DNA; note = MG178-7170 AttP
aggaatcagctattacacgaaatactcgaaaaggtgatctatactaaaacccaacgaggtaatcgcggaggacatgcagataattttaatctagtactatatccgaagctaaacgtatcaaaggattttaattattgataaccttatggcgccatttcttttgcaccataaggttatctataaaaaacaacccagattcaggggttgtttttttcgtattcatccaggtacttttccacaatatacctcaattgctccgaattactccggtgctccctggctgcaactttagtaaacctctcataaag

SEQ ID NO: 7256 - DNA, 308 bp, synthetic construct
  source 1..308: mol_type = other DNA; note = MG178-7170 AttR
aggaatcagctattacacgaaatactcgaaaaggtgatctatactaaaacccaacgaggtaatcgcggaggacatgcagataattttaatctagtactatatccgaagctaaacgtatcaaaggattttaattattgataaccttatggcgccatttcctcagtccctatatccgtcagtatggccttggttacattggtaggcatactgtaccgttgatttaaatagcgtaatgcagctgacagctccccatccggcccgccatattgagtgatcaagtatttggccattctgagatcgggtttgct

SEQ ID NO: 7257 - skipped

SEQ ID NO: 7258 - DNA, 309 bp, synthetic construct
  source 1..309: mol_type = other DNA; note = MG178-7171 AttB
acgtatgcaaagctttgagcatatgggcgtatgatgaagctactgaaaccatccgggtgtcctttctctgatggcagagggaatgtcaaataaaggactatgatagtagaagaacagggaattgattttcggacaggggttcgattcccctcagctccatgctgaatgatgtcggtttttccttattttataaggaattccggcattttctttttagaaatgcttgataacctttttaggatactgattacctttttgattactttttaggctgttttcattggaattgcagcccgatttatctgctgt

SEQ ID NO: 7259 - DNA, 309 bp, synthetic construct
  source 1..309: mol_type = other DNA; note = MG178-7171 AttL
acgtatgcaaagctttgagcatatgggcgtatgatgaagctactgaaaccatccgggtgtcctttctctgatggcagagggaatgtcaaataaaggactatgatagtagaagaacagggaattgattttcggacaggggttcgattcccctcagctccacttaaggagaattatccgaacactttgttttatgcaaatggagtgtttgggataatcgtaaagattaacggtaggatttgattcctaccgttttttttttgtgcgggcccggttcacccggtacccgcctttcacttacttctctttctc

SEQ ID NO: 7260 - DNA, 309 bp, synthetic construct
  source 1..309: mol_type = other DNA; note = MG178-7171 AttP
cagaccctgattgacgtttttgtcaatgcagtctatgtctatgatgaccgtattgtaatcacgtacaattattcaggggctcataattcggtcactttggagcagattgaacaagccttaggggagtctgagggttcggatacagtttcgtcagctccacttaaggagaattatccgaacactttgttttatgcaaatggagtgtttgggataatcgtaaagattaacggtaggatttgattcctaccgttttttttttgtgcgggcccggttcacccggtacccgcctttcacttacttctctttctc

SEQ ID NO: 7261 - DNA, 309 bp, synthetic construct
  source 1..309: mol_type = other DNA; note = MG178-7171 AttR
cagaccctgattgacgtttttgtcaatgcagtctatgtctatgatgaccgtattgtaatcacgtacaattattcaggggctcataattcggtcactttggagcagattgaacaagccttaggggagtctgagggttcggatacagtttcgtcagctccatgctgaatgatgtcggtttttccttattttataaggaattccggcattttctttttagaaatgcttgataacctttttaggatactgattacctttttgattactttttaggctgttttcattggaattgcagcccgatttatctgctgt

SEQ ID NO: 7262 - skipped

SEQ ID NO: 7263 - DNA, 316 bp, synthetic construct
  source 1..316: mol_type = other DNA; note = MG178-7172 AttB 2
attgcggtttcaactgagaaggacgagcgcggaatcaacctcgttgctcgcggctttcgttcggctgctgtgtttcggttgcgtcctaggctgtgttttgcctagaaccgctacaggccaccggctgcgaaaccaaccgatgacctgcgattcccaatggtgcccccggcgcgattcgaacgcgcggcacccgctttaggagagcggtgctctgtcccctgagctacggaggcgcgtttgatattgtagcattaatcgccctgctggcgcggaacttgcaagacgccttgcaggacgcataaaaaagcgatgcgcc

SEQ ID NO: 7264 - DNA, 316 bp, synthetic construct
  source 1..316: mol_type = other DNA; note = MG178-7172 AttB 1
attgcggtttcaactgagaaggacgagcgcggaatcaacctcgttgctcgcggctttcgttcggctgctgtgtttcggttgcgtcctaggctgtgttttgcctagaaccgctacaggccaccggctgcgaaaccaaccgatgacctgcgattccaaatggtgcccccggcgcgattcgaacgcgcggcacccgctttaggagagcggtgctctgtcccctgagctacggaggcgcgtttgatattgtagcattaatcgccctgctggcgcggaacttgcaagacgccttgcaggacgcataaaaaagcgatgcgcc

SEQ ID NO: 7265 - DNA, 316 bp, synthetic construct
  source 1..316: mol_type = other DNA; note = MG178-7172 AttL
attgcggtttcaactgagaaggacgagcgcggaatcaacctcgttgctcgcggctttcgttcggctgctgtgtttcggttgcgtcctaggctgtgttttgcctagaaccgctacaggccaccggctgcgaaaccaaccgatgacctgcgattccaaatggtgccccaatcgcatgtcaaaacgaacgtcaaacgggtatccttttgagacgttgtacaccgaaaacggaacgccgatactcatgcttgaacatggttttgggctggtcgtatcacttaaagcttcttgacgaacttggacatgatgaaaaggtcgt

SEQ ID NO: 7266 - DNA, 316 bp, synthetic construct
  source 1..316: mol_type = other DNA; note = MG178-7172 AttP 2
gatcacgcttacttttgtatctaaagtttggctgtatgaaagcaccgccgtggccgtgatgaactttgattcgtgcgaaagcacgcaatatgagatagaacttgctttgaaaaaacacgaacggcctgatcaacaggccgttcgtgaaacttcccaatggtgccccaatcgcatgtcaaaacgaacgtcaaacgggtatccttttgagacgttgtacaccgaaaacggaacgccgatactcatgcttgaacatggttttgggctggtcgtatcacttaaagcttcttgacgaacttggacatgatgaaaaggtcgt

SEQ ID NO: 7267 - DNA, 316 bp, synthetic construct
  source 1..316: mol_type = other DNA; note = MG178-7172 AttP 1
gatcacgcttacttttgtatctaaagtttggctgtatgaaagcaccgccgtggccgtgatgaactttgattcgtgcgaaagcacgcaatatgagatagaacttgctttgaaaaaacacgaacggcctgatcaacaggccgttcgtgaaacttccaaatggtgccccaatcgcatgtcaaaacgaacgtcaaacgggtatccttttgagacgttgtacaccgaaaacggaacgccgatactcatgcttgaacatggttttgggctggtcgtatcacttaaagcttcttgacgaacttggacatgatgaaaaggtcgt

SEQ ID NO: 7268 - DNA, 316 bp, synthetic construct
  source 1..316: mol_type = other DNA; note = MG178-7172 AttR
gatcacgcttacttttgtatctaaagtttggctgtatgaaagcaccgccgtggccgtgatgaactttgattcgtgcgaaagcacgcaatatgagatagaacttgctttgaaaaaacacgaacggcctgatcaacaggccgttcgtgaaacttccaaatggtgcccccggcgcgattcgaacgcgcggcacccgctttaggagagcggtgctctgtcccctgagctacggaggcgcgtttgatattgtagcattaatcgccctgctggcgcggaacttgcaagacgccttgcaggacgcataaaaaagcgatgcgcc

SEQ ID NO: 7269 - DNA, 16 bp, synthetic construct
  source 1..16: mol_type = other DNA; note = MG178-7172 Core 2
ttcccaatggtgcccc

SEQ ID NO: 7270 - DNA, 16 bp, synthetic construct
  source 1..16: mol_type = other DNA; note = MG178-7172 Core 1
ttccaaatggtgcccc

SEQ ID NO: 7271 - DNA, 311 bp, synthetic construct
  source 1..311: mol_type = other DNA; note = MG178-7174 AttB
atggatcgctacgcctggcttgacaatccctggccctgggattatcagccccagatggaggtataagagatgtttgtatatgaaaagaagctccagtaccctgttaagataaaaaacacaaaccctgcccttgccaaattcattattagccaatacggcggccctgacggcgagctcggcgcttcccttcgctatctaagccagcgctactcaatgccatatccagagctgaagggtcttctgacggatatcggcacggaagagcttgggcatcttgagatgataggcgctatcgttcatcagctgacaag

SEQ ID NO: 7272 - DNA, 311 bp, synthetic construct
  source 1..311: mol_type = other DNA; note = MG178-7174 AttL
atggatcgctacgcctggcttgacaatccctggccctgggattatcagccccagatggaggtataagagatgtttgtatatgaaaagaagctccagtaccctgttaagataaaaaacacaaaccctgcccttgccaaattcattattagccaatacggcggtgcttattgtaaaaacttattatatctattctcccaattttaagcgcagcaatccttaatacggtgcggctcggcgccgtattaaggatcgtgcaattacatatcaacgattcggctccgtgacaactgtcgcgatggcgataagtatcc

SEQ ID NO: 7273 - DNA, 311 bp, synthetic construct
  source 1..311: mol_type = other DNA; note = MG178-7174 AttP
gtgcttgatgtccttgatataatcaaaagcgacaatgtatctgaagctgacaaaaacacagctctcaaagcaattctcagttatattgtgtacgaaaaggctaataatcgcctcgctttgtatttctatttttgatattatcggttttcacaatatggcggtgcttattgtaaaaacttattatatctattctcccaattttaagcgcagcaatccttaatacggtgcggctcggcgccgtattaaggatcgtgcaattacatatcaacgattcggctccgtgacaactgtcgcgatggcgataagtatcc

SEQ ID NO: 7274 - DNA, 311 bp, synthetic construct
  source 1..311: mol_type = other DNA; note = MG178-7174 AttR
gtgcttgatgtccttgatataatcaaaagcgacaatgtatctgaagctgacaaaaacacagctctcaaagcaattctcagttatattgtgtacgaaaaggctaataatcgcctcgctttgtatttctatttttgatattatcggttttcacaatatggcggccctgacggcgagctcggcgcttcccttcgctatctaagccagcgctactcaatgccatatccagagctgaagggtcttctgacggatatcggcacggaagagcttgggcatcttgagatgataggcgctatcgttcatcagctgacaag

SEQ ID NO: 7275 - DNA, 11 bp, synthetic construct
  source 1..11: mol_type = other DNA; note = MG178-7174 Core 1
caatatggcgg

SEQ ID NO: 7276 - DNA, 11 bp, synthetic construct
  source 1..11: mol_type = other DNA; note = MG178-7174 Core 2
caatacggcgg

SEQ ID NO: 7277 - DNA, 318 bp, synthetic construct
  source 1..318: mol_type = other DNA; note = MG178-7175 AttB
tccaggcggagcgggcaaacccggttggcaactcgggcgttaatcagacgttcggcaggaggaaaagagacggctcggtttctgcgtatcaacgggatcgccagaaacgaaaaaagcctacagatgttgatctgtaagccctcaaattgttggtagcgggggcaggatttgaacctacgaccttcgggttatgagcccgacgagctaccagactgctccaccccgcgtcaattcagagtactataccgtaaatgcttcctcgatgcaatccaacgtttactttgggtaacgaaacaggctcttcggatcttcagattc

SEQ ID NO: 7278 - DNA, 318 bp, synthetic construct
  source 1..318: mol_type = other DNA; note = MG178-7175 AttL
tccaggcggagcgggcaaacccggttggcaactcgggcgttaatcagacgttcggcaggaggaaaagagacggctcggtttctgcgtatcaacgggatcgccagaaacgaaaaaagcctacagatgttgatctgtaagccctcaaattgttggtagcgggggcaggatacgtgcgttatctaactccgctgcgctggcggatatggccgccgacctgatcaaccacgcccgacacgagccccgccattggggctttttttatgcctgaaagaaacggttgaagtctcacgtattaaaggaatgacggtctttttggcc

SEQ ID NO: 7279 - DNA, 318 bp, synthetic construct
  source 1..318: mol_type = other DNA; note = MG178-7175 AttP
tggccgagcgactggaacggatcgaagacatcgccgacgcgcgcgaagcgctcaggagcattctaggggaagatatcaagctggtgccggagaacggcgtattgtgggcagaactcaagggcggctgcgccgctttgagtcagataacggtggtagcgggggcaggatacgtgcgttatctaactccgctgcgctggcggatatggccgccgacctgatcaaccacgcccgacacgagccccgccattggggctttttttatgcctgaaagaaacggttgaagtctcacgtattaaaggaatgacggtctttttggcc

SEQ ID NO: 7280 - DNA, 318 bp, synthetic construct
  source 1..318: mol_type = other DNA; note = MG178-7175 AttR
tggccgagcgactggaacggatcgaagacatcgccgacgcgcgcgaagcgctcaggagcattctaggggaagatatcaagctggtgccggagaacggcgtattgtgggcagaactcaagggcggctgcgccgctttgagtcagataacggtggtagcgggggcaggatttgaacctacgaccttcgggttatgagcccgacgagctaccagactgctccaccccgcgtcaattcagagtactataccgtaaatgcttcctcgatgcaatccaacgtttactttgggtaacgaaacaggctcttcggatcttcagattc

SEQ ID NO: 7281 - DNA, 18 bp, synthetic construct
  source 1..18: mol_type = other DNA; note = MG178-7175 Core
tggtagcgggggcaggat

SEQ ID NO: 7282 - DNA, 305 bp, synthetic construct
  source 1..305: mol_type = other DNA; note = MG178-7176 AttB
cgagtctcgcgtcgggagccccatctgcggccggaatcgccgccgcggcatccagaggcagcggatcccagtgcctctgtcggaggagccgatgggcctggtggcggacgatgctgcggaaccagccggggaacgcggccggatcggccagggtccgcaggccgaaccacgcggcgacgaaagactcctggacgacgtcctccgcctgttgtaggtcacgcaggagagccagggcgtagccgaaggccatctgctgaaagcgccgcgtcacctccgcgaacgcgtccaggtcgccctgcctcgcc

SEQ ID NO: 7283 - DNA, 305 bp, synthetic construct
  source 1..305: mol_type = other DNA; note = MG178-7176 AttL
cgagtctcgcgtcgggagccccatctgcggccggaatcgccgccgcggcatccagaggcagcggatcccagtgcctctgtcggaggagccgatgggcctggtggcggacgatgctgcggaaccagccggggaacgcggccggatcggccagggtcaggagactcacccgcgtgaacccgtccaaggtggccaagcgctcgatcgggaaggatcccacaagttccctagcgtggttcggggccagcgcgctcgacctcgttgtgtcgatcagtggtcaggtacacagacgtgccgcatagtgttgc

SEQ ID NO: 7284 - DNA, 305 bp, synthetic construct
  source 1..305: mol_type = other DNA; note = MG178-7176 AttP
tgaagaaggtcttgccgagcaagttgattctgactccccatcccgagagtcggtcctactcgttcgctggcgacggagccatcggccctctgctgggacaggtggtctcgtctcagatggggaagggccagggttcaagtggggaaggtcgggtcaggagactcacccgcgtgaacccgtccaaggtggccaagcgctcgatcgggaaggatcccacaagttccctagcgtggttcggggccagcgcgctcgacctcgttgtgtcgatcagtggtcaggtacacagacgtgccgcatagtgttgc

SEQ ID NO: 7285 - DNA, 305 bp, synthetic construct
  source 1..305: mol_type = other DNA; note = MG178-7176 AttR
tgaagaaggtcttgccgagcaagttgattctgactccccatcccgagagtcggtcctactcgttcgctggcgacggagccatcggccctctgctgggacaggtggtctcgtctcagatggggaagggccagggttcaagtggggaaggtcgggtccgcaggccgaaccacgcggcgacgaaagactcctggacgacgtcctccgcctgttgtaggtcacgcaggagagccagggcgtagccgaaggccatctgctgaaagcgccgcgtcacctccgcgaacgcgtccaggtcgccctgcctcgcc

SEQ ID NO: 7286 - skipped

SEQ ID NO: 7287 - DNA, 308 bp, synthetic construct
  source 1..308: mol_type = other DNA; note = MG178-7178 AttB
tttaacttctttatcctctgtttcatcaatcactgcattcataatgatattttcattgaatgtacttgccgtttctgcaactggcatagaatactcccaatttaatggtctatgactttcaatgtttaatccatgatatgcatgtccaagttcatgagccaaagtaactacgtctccaagtcctccatcaaaattagttaatacgcgtgattgtttcgcaaacggcatattgcagcagaaagctccaccaacttttcctttatgtggataaaaatcaatccagttattgtcaaatgcttcttccatca

SEQ ID NO: 7288 - DNA, 308 bp, synthetic construct
  source 1..308: mol_type = other DNA; note = MG178-7178 AttL
tttaacttctttatcctctgtttcatcaatcactgcattcataatgatattttcattgaatgtacttgccgtttctgcaactggcatagaatactcccaatttaatggtctatgactttcaatgtttaatccatgatatgcatgtccaagttcatgagagcgtggatgtatacgcaaaataaataagcgtactgtttaggaaaataaaaaaatagccctgtttcaacagagctaccatagattaatgtcaaaatgtatattaacctcaaagcttttccattatagcataaaaaaaagaacctatggaa

SEQ ID NO: 7289 - DNA, 308 bp, synthetic construct
  source 1..308: mol_type = other DNA; note = MG178-7178 AttP
attgaaatgctaaaggatgattctatatccgcaaaaataaaaaataatttcctaaaggaaatcatacaagttatttattataaaaaagataaattaggaaatattacattagatatttatttacgctagtagcgagcattcacggactgattcatgagagcgtggatgtatacgcaaaataaataagcgtactgtttaggaaaataaaaaaatagccctgtttcaacagagctaccatagattaatgtcaaaatgtatattaacctcaaagcttttccattatagcataaaaaaaagaacctatggaa

SEQ ID NO: 7290 - DNA, 308 bp, synthetic construct
  source 1..308: mol_type = other DNA; note = MG178-7178 AttR
attgaaatgctaaaggatgattctatatccgcaaaaataaaaaataatttcctaaaggaaatcatacaagttatttattataaaaaagataaattaggaaatattacattagatatttatttacgctagtagcgagcattcacggactgattcatgagccaaagtaactacgtctccaagtcctccatcaaaattagttaatacgcgtgattgtttcgcaaacggcatattgcagcagaaagctccaccaacttttcctttatgtggataaaaatcaatccagttattgtcaaatgcttcttccatca

SEQ ID NO: 7291 - skipped

SEQ ID NO: 7292 - DNA, 309 bp, synthetic construct
  source 1..309: mol_type = other DNA; note = MG178-7179 AttB
aaggtaagctcgccagtcctccgacgcgctgcgcgctatggaggacatccttcccctgcgggtactcctgtctgcgctcatccttttcactcgctttgctcgcggaaaagaatggcttgccatccgtagctcgacttcgtcgagcgaaggatggtgggcgtaacagaactcgaatctgtgaccttcacgatgtcaacgtgacgctctaaccaactgagctatacgcccttgcggacttgaaacacaatccggaccggcgggcggccggattcttttgcggttgcggcgttttacataaccaccgacaac

SEQ ID NO: 7293 - DNA, 309 bp, synthetic construct
  source 1..309: mol_type = other DNA; note = MG178-7179 AttL
aaggtaagctcgccagtcctccgacgcgctgcgcgctatggaggacatccttcccctgcgggtactcctgtctgcgctcatccttttcactcgctttgctcgcggaaaagaatggcttgccatccgtagctcgacttcgtcgagcgaaggatggtgggccaaatcaaacttactcataacaagatttttggaatttaaatgcgggaggcggggccagcttcgcgcatcgcaagtatgacatttcaaaaaaaaggcaaaaaattcccggccgaattttggcagcggggagagctgcgccgcctctgatcc

SEQ ID NO: 7294 - DNA, 309 bp, synthetic construct
  source 1..309: mol_type = other DNA; note = MG178-7179 AttP
agaatggacaaaaaaaattgcatctggtgaagctgattttgctaccaaacgcaatttaatcatgtcggtaatcgaatctcttgaatgcgtcaaacgatcagatactcaaataggcttcaagatgaaacttgttatgagtagtagttgtaaatggtgggccaaatcaaacttactcataacaagatttttggaatttaaatgcgggaggcggggccagcttcgcgcatcgcaagtatgacatttcaaaaaaaaggcaaaaaattcccggccgaattttggcagcggggagagctgcgccgcctctgatcc

SEQ ID NO: 7295 - DNA, 309 bp, synthetic construct
  source 1..309: mol_type = other DNA; note = MG178-7179 AttR
agaatggacaaaaaaaattgcatctggtgaagctgattttgctaccaaacgcaatttaatcatgtcggtaatcgaatctcttgaatgcgtcaaacgatcagatactcaaataggcttcaagatgaaacttgttatgagtagtagttgtaaatggtgggcgtaacagaactcgaatctgtgaccttcacgatgtcaacgtgacgctctaaccaactgagctatacgcccttgcggacttgaaacacaatccggaccggcgggcggccggattcttttgcggttgcggcgttttacataaccaccgacaac

SEQ ID NO: 7296 - skipped

SEQ ID NO: 7297 - DNA, 312 bp, synthetic construct
  source 1..312: mol_type = other DNA; note = MG178-7180 AttB
taaaaatatgtcttgacctgaacgatatttgcatatatacattcgttagtttttggcagattgctgctgaaaagtcctaacggtcccatcgtctaatggttaggacaccaccctttcacggtggcgatacgagttcgaatctcgttgggatcaccaatgcaaagaaacctcccttgcggaggtttctttgtattgataaagagcccaggagagatttgaacgagtagagttcggagcgggtagttggggagcgcgattaaaagaagcgcgggccgtacgtcgcgaaaggggcccgcggtgggagccgtggga

SEQ ID NO: 7298 - DNA, 312 bp, synthetic construct
  source 1..312: mol_type = other DNA; note = MG178-7180 AttL
taaaaatatgtcttgacctgaacgatatttgcatatatacattcgttagtttttggcagattgctgctgaaaagtcctaacggtcccatcgtctaatggttaggacaccaccctttcacggtggcgatacgagttcgaatctcgttgggatcaccaatgcaagcggcaggtataaaaactgccgtttttcttttataaatcaagcacttagccgagttcgaatgttgtaaatttgaaaatgtcattttgggagaattttccgaactcgtttgacgataatcctttatttttcaatggtttgtctgagttaga

SEQ ID NO: 7299 - DNA, 312 bp, synthetic construct
  source 1..312: mol_type = other DNA; note = MG178-7180 AttP
gaaaagttgaaggaacagatattcccgaaacccttacgcttaatagtgataatgaaattattaaaattgaagatatgttgaaagaaattgaaaagttttgggataataaaattttatcatctaaatagctcgtggattgtgagttaagcttcaccaatacaagcggcaggtataaaaactgccgtttttcttttataaatcaagcacttagccgagttcgaatgttgtaaatttgaaaatgtcattttgggagaattttccgaactcgtttgacgataatcctttatttttcaatggtttgtctgagttaga

SEQ ID NO: 7300 - DNA, 312 bp, synthetic construct
  source 1..312: mol_type = other DNA; note = MG178-7180 AttR
gaaaagttgaaggaacagatattcccgaaacccttacgcttaatagtgataatgaaattattaaaattgaagatatgttgaaagaaattgaaaagttttgggataataaaattttatcatctaaatagctcgtggattgtgagttaagcttcaccaatacaaagaaacctcccttgcggaggtttctttgtattgataaagagcccaggagagatttgaacgagtagagttcggagcgggtagttggggagcgcgattaaaagaagcgcgggccgtacgtcgcgaaaggggcccgcggtgggagccgtggga

SEQ ID NO: 7301 - DNA, 12 bp, synthetic construct
  source 1..12: mol_type = other DNA; note = MG178-7180 Core
tcaccaatgcaa

SEQ ID NO: 7302 - DNA, 312 bp, synthetic construct
  source 1..312: mol_type = other DNA; note = MG178-7181 AttB
ttaagaaagcttaagaggccagaagctccttacagttggacccatctgaaccgaattttgctaaaagcagacgaaaaaacgggaacgccgttcttttgctccctaaaagatcaagcctcctgtccatggacaggaggcttgcaagttatacagttggtgggcccactaggattcgaacctaggaccaaccggttatgagccgggggctctaccgctgagctataggcccaatgtaggaattataccccagaaaaagatgcgctgtcaacgtttcttactcgaggaattccttgaggggtttgctccgtttcg

SEQ ID NO: 7303 - DNA, 312 bp, synthetic construct
  source 1..312: mol_type = other DNA; note = MG178-7181 AttL
ttaagaaagcttaagaggccagaagctccttacagttggacccatctgaaccgaattttgctaaaagcagacgaaaaaacgggaacgccgttcttttgctccctaaaagatcaagcctcctgtccatggacaggaggcttgcaagttatacagttggtgggctatctaaccctgagtgcgaacctaaaagtaaagataggccgcggctggttttccgtatcctaccccatcagtacacaggggatttgatattttattctaggagaaggcaattacttttgacctgacttttgaagagctagccgaatgccg

SEQ ID NO: 7304 - DNA, 312 bp, synthetic construct
  source 1..312: mol_type = other DNA; note = MG178-7181 AttP
cagatgtaccggaacaatttacttgatgtcctggttagtcgtgttgtcctttaccccaacagggcagaagtattttatcgctacaaaaaagaactcccttccctccctaatccagttatcatcagggaagaaaggggttcgaatggcacgcagttggtgggctatctaaccctgagtgcgaacctaaaagtaaagataggccgcggctggttttccgtatcctaccccatcagtacacaggggatttgatattttattctaggagaaggcaattacttttgacctgacttttgaagagctagccgaatgccg

SEQ ID NO: 7305 - DNA, 312 bp, synthetic construct
  source 1..312: mol_type = other DNA; note = MG178-7181 AttR
cagatgtaccggaacaatttacttgatgtcctggttagtcgtgttgtcctttaccccaacagggcagaagtattttatcgctacaaaaaagaactcccttccctccctaatccagttatcatcagggaagaaaggggttcgaatggcacgcagttggtgggcccactaggattcgaacctaggaccaaccggttatgagccgggggctctaccgctgagctataggcccaatgtaggaattataccccagaaaaagatgcgctgtcaacgtttcttactcgaggaattccttgaggggtttgctccgtttcg

SEQ ID NO: 7306 - DNA, 12 bp, synthetic construct
  source 1..12: mol_type = other DNA; note = MG178-7181 Core
cagttggtgggc

SEQ ID NO: 7307 - DNA, 311 bp, synthetic construct
  source 1..311: mol_type = other DNA; note = MG178-7182 AttB
atttgtattgaaataaagtacagcaaagaaaagaagattttttgatataaatactgatatcgaataaaaaagagagtacaaggttatagtccttgtactctcttttttattcgataacaaatacgaacttattcttcgtctccgttttcgtcttccttcatattgtggaacacattctgaacgtcttcgtcctcttccaacttttcaatcaatttttcaatcgattcacgctgctcgggagtcacttctttcacatcgttcggaatacggacaaattcgctactggtgatttcatatccattctcttccag

SEQ ID NO: 7308 - DNA, 311 bp, synthetic construct
  source 1..311: mol_type = other DNA; note = MG178-7182 AttL
atttgtattgaaataaagtacagcaaagaaaagaagattttttgatataaatactgatatcgaataaaaaagagagtacaaggttatagtccttgtactctcttttttattcgataacaaatacgaacttattcttcgtctccgttttcgtcttccttcattacaatggaaaagtttgcaatcttaataccttcattgtatatttgcatacaaataaatgatattcaagatgaaaaaagcagctttattattaagatgtagtactgattcacaggattatgataggcagcaaagagatttactacctacgg

SEQ ID NO: 7309 - DNA, 311 bp, synthetic construct
  source 1..311: mol_type = other DNA; note = MG178-7182 AttP
tggtaagttcctaaagtccaaaactccattactacaaaaaacaaaaggaagcacaaatcagcctccttttgttaaattatactaaaatataatatactaatatttataatatattgatattcaaattattcttcattgtcattaattccatcttccttcattacaatggaaaagtttgcaatcttaataccttcattgtatatttgcatacaaataaatgatattcaagatgaaaaaagcagctttattattaagatgtagtactgattcacaggattatgataggcagcaaagagatttactacctacgg

SEQ ID NO: 7310 - DNA, 311 bp, synthetic construct
  source 1..311: mol_type = other DNA; note = MG178-7182 AttR
tggtaagttcctaaagtccaaaactccattactacaaaaaacaaaaggaagcacaaatcagcctccttttgttaaattatactaaaatataatatactaatatttataatatattgatattcaaattattcttcattgtcattaattccatcttccttcatattgtggaacacattctgaacgtcttcgtcctcttccaacttttcaatcaatttttcaatcgattcacgctgctcgggagtcacttctttcacatcgttcggaatacggacaaattcgctactggtgatttcatatccattctcttccag

SEQ ID NO: 7311 - DNA, 11 bp, synthetic construct
  source 1..11: mol_type = other DNA; note = MG178-7182 Core
tcttccttcat

SEQ ID NO: 7312 - DNA, 310 bp, synthetic construct
  source 1..310: mol_type = other DNA; note = MG178-7183 AttB
ggctaagaaggatggtgagataaaagatgccctctcctatatcagggaaaccggcgcagagtttgacctggacctcccagccaagggtgttccgaccaagggcctcagatcagaccggttaggggttaagaagtcagaggaggcgggccgatgatgttcagattcgcctacccggtcgtgctcctgcttctccttgttgtggcgggatggcttttctttgccctatggaggaagccttccggcatcacctattccatgacctcaaagatggctggccttgccgggggtgtgaaccaggtcctggcgaggc

SEQ ID NO: 7313 - DNA, 310 bp, synthetic construct
  source 1..310: mol_type = other DNA; note = MG178-7183 AttL
ggctaagaaggatggtgagataaaagatgccctctcctatatcagggaaaccggcgcagagtttgacctggacctcccagccaagggtgttccgaccaagggcctcagatcagaccggttaggggttaagaagtcagaggaggcgggccgatgatgttcatgttgtagacactttacaactatcaacacataatcaaaaataatcattgacaaggcattttcaaagatggtataaggtgaaaatgaaagcaaatcgaagctgttagtagtaattggctgattatcgaaggaaatgaggacatttactctg

SEQ ID NO: 7314 - DNA, 310 bp, synthetic construct
  source 1..310: mol_type = other DNA; note = MG178-7183 AttP
aggagatcctaattatgtgatctcattcaagagcggtgtcattagatctctattcccttacaaagataagaagttatcatggcaattagacaagacaaagaaacaactggacatctattaatgataacagcaatgggttaaatagactatatgatgttcatgttgtagacactttacaactatcaacacataatcaaaaataatcattgacaaggcattttcaaagatggtataaggtgaaaatgaaagcaaatcgaagctgttagtagtaattggctgattatcgaaggaaatgaggacatttactctg

SEQ ID NO: 7315 - DNA, 310 bp, synthetic construct
  source 1..310: mol_type = other DNA; note = MG178-7183 AttR
aggagatcctaattatgtgatctcattcaagagcggtgtcattagatctctattcccttacaaagataagaagttatcatggcaattagacaagacaaagaaacaactggacatctattaatgataacagcaatgggttaaatagactatatgatgttcagattcgcctacccggtcgtgctcctgcttctccttgttgtggcgggatggcttttctttgccctatggaggaagccttccggcatcacctattccatgacctcaaagatggctggccttgccgggggtgtgaaccaggtcctggcgaggc

SEQ ID NO: 7316 - DNA, 10 bp, synthetic construct
  source 1..10: mol_type = other DNA; note = MG178-7183 Core
atgatgttca

SEQ ID NO: 7317 - DNA, 308 bp, synthetic construct
  source 1..308: mol_type = other DNA; note = MG178-7184 AttB
tggaacggcacgaagcgccttgggaggattcaaggtcatggggggcctggtctcggccaatatgacctataatgccaaagaaaacaaatccgtcatcgacagctccaataaaccccgcggcgggttcggcggcggcctgggatatgaaaggggatcccgactcgggtttgaaatcgatttgctctatctcccgaaaggggcgcttttcaagggggatttatccgggatcacctttgatttgaagttcagcatcgacgaagtgagcgtccccatccttctcaagctgaatgtcctcaggaacaaagtgc

SEQ ID NO: 7318 - DNA, 308 bp, synthetic construct
  source 1..308: mol_type = other DNA; note = MG178-7184 AttL
tggaacggcacgaagcgccttgggaggattcaaggtcatggggggcctggtctcggccaatatgacctataatgccaaagaaaacaaatccgtcatcgacagctccaataaaccccgcggcgggttcggcggcggcctgggatatgaaaggggatcccaaaatatatgaacttataaatgggtttgtaaccttcctcaagcatttcagcgtatcccctcaactccaaaacctttgtcagatcagagggtaaaaaatgcctacatccctgagaaagagaattgaccgggacatggagcagaaggaagaa

SEQ ID NO: 7319 - DNA, 308 bp, synthetic construct
  source 1..308: mol_type = other DNA; note = MG178-7184 AttP
aaatccttgctctcgttcttgataaggtttttctaagagacggcaaagcacaattccactggaaacctccgttcgactttctattttcgataaacaaaatcttagaagaagaagaaccccaggcaggttcttttataaggtcgagtgaaagggatcccaaaatatatgaacttataaatgggtttgtaaccttcctcaagcatttcagcgtatcccctcaactccaaaacctttgtcagatcagagggtaaaaaatgcctacatccctgagaaagagaattgaccgggacatggagcagaaggaagaa

SEQ ID NO: 7320 - DNA, 308 bp, synthetic construct
  source 1..308: mol_type = other DNA; note = MG178-7184 AttR
aaatccttgctctcgttcttgataaggtttttctaagagacggcaaagcacaattccactggaaacctccgttcgactttctattttcgataaacaaaatcttagaagaagaagaaccccaggcaggttcttttataaggtcgagtgaaagggatcccgactcgggtttgaaatcgatttgctctatctcccgaaaggggcgcttttcaagggggatttatccgggatcacctttgatttgaagttcagcatcgacgaagtgagcgtccccatccttctcaagctgaatgtcctcaggaacaaagtgc

SEQ ID NO: 7321 - skipped

SEQ ID NO: 7322 - DNA, 312 bp, synthetic construct
  source 1..312: mol_type = other DNA; note = MG178-7185 AttB
ggaaaatctaatgccttcagagaactctgcaaaatttcggcctgaaaagttctctatggagctcgtagaaatggtccaggtgcaaaaacctcgcgatttggcgggctttccggccaaacttatgggccgcacgtttcgctgaggactgtttggtagcgggggagggactcgaacccccgacacgcggattatgattccgctgctctaaccagctgagctaccccgccgccaccagcccggcgaaaccgggcatttcaaccaaccatataaggggttgggcgccggttctaaaggcgtgcgagccggtgtcaa

SEQ ID NO: 7323 - DNA, 312 bp, synthetic construct
  source 1..312: mol_type = other DNA; note = MG178-7185 AttL
ggaaaatctaatgccttcagagaactctgcaaaatttcggcctgaaaagttctctatggagctcgtagaaatggtccaggtgcaaaaacctcgcgatttggcgggctttccggccaaacttatgggccgcacgtttcgctgaggactgtttggtagcgggggctcgtctcattcaatcccaccgactggccaagtgataccctttaggctgacttgccggggtccgctggcggcatgacctactgccacttctccatgcgagtaactgccgccgcgggcaccacgatggtcttgcggtcaaagtagaatact

SEQ ID NO: 7324 - DNA, 312 bp, synthetic construct
  source 1..312: mol_type = other DNA; note = MG178-7185 AttP
ggccatccgcgagctagtggagacggttaccgtcaggcgtgacccgagccgccgcggtggtgttgaagtggaaatatccggccgcctcgcggcgctcttgaatgcgccagtgtacccaggccatttgcgttcccctgtcggtgggaacgctggtagcgggggctcgtctcattcaatcccaccgactggccaagtgataccctttaggctgacttgccggggtccgctggcggcatgacctactgccacttctccatgcgagtaactgccgccgcgggcaccacgatggtcttgcggtcaaagtagaatact

SEQ ID NO: 7325 - DNA, 312 bp, synthetic construct
  source 1..312: mol_type = other DNA; note = MG178-7185 AttR
ggccatccgcgagctagtggagacggttaccgtcaggcgtgacccgagccgccgcggtggtgttgaagtggaaatatccggccgcctcgcggcgctcttgaatgcgccagtgtacccaggccatttgcgttcccctgtcggtgggaacgctggtagcgggggagggactcgaacccccgacacgcggattatgattccgctgctctaaccagctgagctaccccgccgccaccagcccggcgaaaccgggcatttcaaccaaccatataaggggttgggcgccggttctaaaggcgtgcgagccggtgtcaa

SEQ ID NO: 7326 - DNA, 12 bp, synthetic construct
  source 1..12: mol_type = other DNA; note = MG178-7185 Core
tggtagcggggg

SEQ ID NO: 7327 - DNA, 305 bp, synthetic construct
  source 1..305: mol_type = other DNA; note = MG178-7186 AttB
atgacgccgtcggcgagcgcgtcgggagccaggtacacgtcgacggtgcgaccgagcgcgacatcgaccgtgcggacgtcgccggcggcgaccgcctggcccgccacgatcgtgcgggcagcggcgagcaccggaaccgtctgacgcgaggccgagacgacgaaccacacgcccgcgatcgacgcgacgaccagcaccacgccgatgaggaatcgggcgtcggaccagaacggcttcgggcgtggtcgggaggcgtcgatcgcggtcatgccaaccatcgtgacccaggccgcggagtgcccctc

SEQ ID NO: 7328 - DNA, 305 bp, synthetic construct
  source 1..305: mol_type = other DNA; note = MG178-7186 AttL
atgacgccgtcggcgagcgcgtcgggagccaggtacacgtcgacggtgcgaccgagcgcgacatcgaccgtgcggacgtcgccggcggcgaccgcctggcccgccacgatcgtgcgggcagcggcgagcaccggaaccgtctgacgcgaggccgaccctatggtgtaattaccaccgtgagggcagcgacctacgagcggatctcccaagaccgggaatcgaccgagcacggcgttgacaaccaacggtcggccaatctcgccttggccgcaaggctcgggttcgatgtggtctcggactaccgc

SEQ ID NO: 7329 - DNA, 305 bp, synthetic construct
  source 1..305: mol_type = other DNA; note = MG178-7186 AttP
cgatcgtctccgcactggccgcaagcgtgcccactgtaatggaggacatcgcccgaccgcccagcgcatacttcgtacgttgcgagcatctccagtggcaggagccgattcacatcgagtatctgtagccggggtgcctattgcgccattgccgaccctatggtgtaattaccaccgtgagggcagcgacctacgagcggatctcccaagaccgggaatcgaccgagcacggcgttgacaaccaacggtcggccaatctcgccttggccgcaaggctcgggttcgatgtggtctcggactaccgc

SEQ ID NO: 7330 - DNA, 305 bp, synthetic construct
  source 1..305: mol_type = other DNA; note = MG178-7186 AttR
cgatcgtctccgcactggccgcaagcgtgcccactgtaatggaggacatcgcccgaccgcccagcgcatacttcgtacgttgcgagcatctccagtggcaggagccgattcacatcgagtatctgtagccggggtgcctattgcgccattgccgagacgacgaaccacacgcccgcgatcgacgcgacgaccagcaccacgccgatgaggaatcgggcgtcggaccagaacggcttcgggcgtggtcgggaggcgtcgatcgcggtcatgccaaccatcgtgacccaggccgcggagtgcccctc

SEQ ID NO: 7331 - skipped

SEQ ID NO: 7332 - DNA, 310 bp, synthetic construct
  source 1..310: mol_type = other DNA; note = MG178-7187 AttB
ccaagcgccgacccagcatgccggaactagccaatggaataatgctatagatctaaaatgagaaatagccaaagttttgggctcgaacaagaaatgggataatagaagattttgtatacaaaaaaagccccaattaggggctaaatcaataaatggtggaccgtcggggactcgaaccccggaccttgggattaagagtcccctgctctaccaactaagctaacggtccatgagaatgccgtgtatttcaacggctatctattatgcatcattgatgcgaattatcaaggttgcgctggggtgggtaatc

SEQ ID NO: 7333 - DNA, 310 bp, synthetic construct
  source 1..310: mol_type = other DNA; note = MG178-7187 AttL
ccaagcgccgacccagcatgccggaactagccaatggaataatgctatagatctaaaatgagaaatagccaaagttttgggctcgaacaagaaatgggataatagaagattttgtatacaaaaaaagccccaattaggggctaaatcaataaatggtggagctacgcacacttaatcagaacaacgttatttgcatcaattcaacgaggatggaaatctcaaaacattggtttgcggtgataacgctattggacgataggttcgaagatggacgaaagaagcccaagaaggataaagacgcctaggcaga

SEQ ID NO: 7334 - DNA, 310 bp, synthetic construct
  source 1..310: mol_type = other DNA; note = MG178-7187 AttP
gcgaacacccagatgaaagggtgttcgcctatagaatcaatggtggaccgtcggggactcgaaccccggaccttgggattaagagtcccctgctctaccaactaagctaacggtccatggtaaacgctctaaacgaacgtgaaaaatctcaaatggtggagctacgcacacttaatcagaacaacgttatttgcatcaattcaacgaggatggaaatctcaaaacattggtttgcggtgataacgctattggacgataggttcgaagatggacgaaagaagcccaagaaggataaagacgcctaggcaga

SEQ ID NO: 7335 - DNA, 310 bp, synthetic construct
  source 1..310: mol_type = other DNA; note = MG178-7187 AttR
gcgaacacccagatgaaagggtgttcgcctatagaatcaatggtggaccgtcggggactcgaaccccggaccttgggattaagagtcccctgctctaccaactaagctaacggtccatggtaaacgctctaaacgaacgtgaaaaatctcaaatggtggaccgtcggggactcgaaccccggaccttgggattaagagtcccctgctctaccaactaagctaacggtccatgagaatgccgtgtatttcaacggctatctattatgcatcattgatgcgaattatcaaggttgcgctggggtgggtaatc

SEQ ID NO: 7336 - DNA, 10 bp, synthetic construct
  source 1..10: mol_type = other DNA; note = MG178-7187 Core
aaatggtgga

SEQ ID NO: 7337 - DNA, 311 bp, synthetic construct
  source 1..311: mol_type = other DNA; note = MG178-7188 AttB
atcgagagctaccagcccgacaagggaaccaagctcgccacctttgcggctcgttgtatcgaaaacgagattttgatgcatctccgttccctgaaaaaaacgcgcaaggatgtgtccctgcacgatccgatcggaacggacaaagagggcaacgagtttacgttaatcgatatcctgggaaccgataccgacgaagtcgtcgacaaagtgcagctgaaaatcgagaaaagcaaaatttttcgcaacctggacattctcgatgaacgcgaaaaagaagtggtgatcggccgtttcggcctcgatgcgggcgg

SEQ ID NO: 7338 - DNA, 311 bp, synthetic construct
  source 1..311: mol_type = other DNA; note = MG178-7188 AttL
atcgagagctaccagcccgacaagggaaccaagctcgccacctttgcggctcgttgtatcgaaaacgagattttgatgcatctccgttccctgaaaaaaacgcgcaaggatgtgtccctgcacgatccgatcggaacggacaaagagggcaacgagtttacatcaaatggttatctgtatccttatgtacatcctacccattatatggtataatacccttaacgatgcggtggcggaataggtagacgcacaacctcaagggcaataacgggcgcggtaagggtgcagcccactaaggaccgcccgcgtca

SEQ ID NO: 7339 - DNA, 311 bp, synthetic construct
  source 1..311: mol_type = other DNA; note = MG178-7188 AttP
tggaaatccaagtaccccgcaaagaaaaacgcccttctcaaatccgtcctccttcatgccacttacaaaaaagaaaagtggcagcgtaaagatcaattcgaacttgtcctggtgccgaagttcaaataatacagataaggtattgatgagaacgagtttacatcaaatggttatctgtatccttatgtacatcctacccattatatggtataatacccttaacgatgcggtggcggaataggtagacgcacaacctcaagggcaataacgggcgcggtaagggtgcagcccactaaggaccgcccgcgtca

SEQ ID NO: 7340 - DNA, 311 bp, synthetic construct
  source 1..311: mol_type = other DNA; note = MG178-7188 AttR
tggaaatccaagtaccccgcaaagaaaaacgcccttctcaaatccgtcctccttcatgccacttacaaaaaagaaaagtggcagcgtaaagatcaattcgaacttgtcctggtgccgaagttcaaataatacagataaggtattgatgagaacgaaattacgttaatcgatatcctgggaaccgataccgacgaagtcgtcgacaaagtgcagctgaaaatcgagaaaagcaaaatttttcgcaacctggacattctcgatgaacgcgaaaaagaagtggtgatcggccgtttcggcctcgatgcgggcgg

SEQ ID NO: 7341 - DNA, 11 bp, synthetic construct
  source 1..11: mol_type = other DNA; note = MG178-7188 Core
aacgaaattac

SEQ ID NO: 7342 - DNA, 310 bp, synthetic construct
  source 1..310: mol_type = other DNA; note = MG178-7189 AttB
acgcaaagttgtctgctgttcaatgtcctaattgcaaaaaaaatcttcgagatcacctcgaagatttttttatctcattgtatacccgaaaactatttcacaaaaaaataagttcggataatactcttttggtggagaattgcgcccgtcactcgaactcactacctctacaatgcgaatgtagcgctctcccagatgagctacgcccccaagcgcttataaagtatagcagattttttgtcgtttgtcaataccgccgcaaaataaatttgaaaaggaaacgcaaattttcgtgacggtgtattcggtg

SEQ ID NO: 7343 - DNA, 310 bp, synthetic construct
  source 1..310: mol_type = other DNA; note = MG178-7189 AttL
acgcaaagttgtctgctgttcaatgtcctaattgcaaaaaaaatcttcgagatcacctcgaagatttttttatctcattgtatacccgaaaactatttcacaaaaaaataagttcggataatactcttttggtggagaattgcgcccgtcactcgaactctttatagtctacaagaatgtattcttaaccacgtccgcattgcgatgattttattttttcaaaaacgcttcgaccgcttctcttacgatctgcgcctgagaaataccctcgcggacgcactttgtcttaaactcttcgaccattgccttt

SEQ ID NO: 7344 - DNA, 310 bp, synthetic construct
  source 1..310: mol_type = other DNA; note = MG178-7189 AttP
tttctcaatgccgtttttgtctatgacgaaagtgttacatttgcattcaattactccaataacggagaaaaagtcaccctctccgaagttgataatatcaacggttcaggtgactttttcgagtgtggttacgatggtggagacgatgagactcgaactctttatagtctacaagaatgtattcttaaccacgtccgcattgcgatgattttattttttcaaaaacgcttcgaccgcttctcttacgatctgcgcctgagaaataccctcgcggacgcactttgtcttaaactcttcgaccattgccttt

SEQ ID NO: 7345 - DNA, 310 bp, synthetic construct
  source 1..310: mol_type = other DNA; note = MG178-7189 AttR
tttctcaatgccgtttttgtctatgacgaaagtgttacatttgcattcaattactccaataacggagaaaaagtcaccctctccgaagttgataatatcaacggttcaggtgactttttcgagtgtggttacgatggtggagacgatgagactcgaactcactacctctacaatgcgaatgtagcgctctcccagatgagctacgcccccaagcgcttataaagtatagcagattttttgtcgtttgtcaataccgccgcaaaataaatttgaaaaggaaacgcaaattttcgtgacggtgtattcggtg

SEQ ID NO: 7346 - DNA, 10 bp, synthetic construct
  source 1..10: mol_type = other DNA; note = MG178-7189 Core
actcgaactc

SEQ ID NO: 7347 - DNA, 311 bp, synthetic construct
  source 1..311: mol_type = other DNA; note = MG178-7190 AttB
aagttccctctcaaaaaaatccttaatcagctttatagcaatttctgtttccattatattctgtctggaagtgtatccttccggtattataatacttcccatgtttctactcctaactacaaatctacaaaaaaaaattactaattaaaatggcgcacccagcaggagttgaacccacaaccttctgatccgtagtcagacgctctatccaattgagctatggatgcacatttaagtatatattttaaaaaaaaatggcggagaaggagggatttgaaccctcgatccaagttttagcccggatactccct

SEQ ID NO: 7348 - DNA, 311 bp, synthetic construct
  source 1..311: mol_type = other DNA; note = MG178-7190 AttL
aagttccctctcaaaaaaatccttaatcagctttatagcaatttctgtttccattatattctgtctggaagtgtatccttccggtattataatacttcccatgtttctactcctaactacaaatctacaaaaaaaaattactaattaaaatggcgcacccaagtgcatacttagtcaccacaactaagaatccttgaattgcaatattttattttttcatgttccttataataccataatttacttgaatttgcaattcttttcattgagttcctcttctgaaatgcgatgcactaagcctttcaactttt

SEQ ID NO: 7349 - DNA, 311 bp, synthetic construct
  source 1..311: mol_type = other DNA; note = MG178-7190 AttP
gtatcagaattaaaagaaattttgaatctgattatacaaaaaattgttctaagtaaaaatggagaaatagaagtaatattttaaaagaaaaagacccaataaaaattttaggtctttttttatttattataaaaaattgtgttttttaactggcgcacccaagtgcatacttagtcaccacaactaagaatccttgaattgcaatattttattttttcatgttccttataataccataatttacttgaatttgcaattcttttcattgagttcctcttctgaaatgcgatgcactaagcctttcaactttt

SEQ ID NO: 7350 - DNA, 311 bp, synthetic construct
  source 1..311: mol_type = other DNA; note = MG178-7190 AttR
gtatcagaattaaaagaaattttgaatctgattatacaaaaaattgttctaagtaaaaatggagaaatagaagtaatattttaaaagaaaaagacccaataaaaattttaggtctttttttatttattataaaaaattgtgttttttaactggcgcacccagcaggagttgaacccacaaccttctgatccgtagtcagacgctctatccaattgagctatggatgcacatttaagtatatattttaaaaaaaaatggcggagaaggagggatttgaaccctcgatccaagttttagcccggatactccct

SEQ ID NO: 7351 - DNA, 11 bp, synthetic construct
  source 1..11: mol_type = other DNA; note = MG178-7190 Core
tggcgcaccca

SEQ ID NO: 7352 - DNA, 315 bp, synthetic construct
  source 1..315: mol_type = other DNA; note = MG178-7191 AttB
gatcgagattccaacggtactgcccctgccgatcccggaagtgtccgtaaatacaagaaaaggcgtagtcgtcaactacgccccctgtgaactcgctgtataaaaagcgagtgttcttacagcctttcaaatgctataagaacactcgatatggttgcggagacaggatttgaacctgcgacctccgggttatgagcccgacgagctaccgaactgctccactccgcgatatgaacttgacccctcaaggctcatatactataacatatgagccttgggttgtcaagtgttattttagcgctcggaaacagaaga

SEQ ID NO: 7353 - DNA, 315 bp, synthetic construct
  source 1..315: mol_type = other DNA; note = MG178-7191 AttL
gatcgagattccaacggtactgcccctgccgatcccggaagtgtccgtaaatacaagaaaaggcgtagtcgtcaactacgccccctgtgaactcgctgtataaaaagcgagtgttcttacagcctttcaaatgctataagaacactcgatatggttgcggagacacacaacatagattaccagcgattttttccggaaatcctttttatgttcacatcaagcatttaagtgctgtatttcacgctgttctgctgtctaatgtggctacgatttgcgccttttctatagagtatcctagtcggtgaagcaaggaca

SEQ ID NO: 7354 - DNA, 315 bp, synthetic construct
  source 1..315: mol_type = other DNA; note = MG178-7191 AttP
gttgatacaatcacgcggtggttgaatgccttgaaaaacaatccggatgaaaaggccgtaaagctgcttgtgaagcgaattgacgtttccggagataaaaagaacaacgtgttcaatatacaaagcacattgaacacgttgttggaaataatggttgcggagacacacaacatagattaccagcgattttttccggaaatcctttttatgttcacatcaagcatttaagtgctgtatttcacgctgttctgctgtctaatgtggctacgatttgcgccttttctatagagtatcctagtcggtgaagcaaggaca

SEQ ID NO: 7355 - DNA, 315 bp, synthetic construct
  source 1..315: mol_type = other DNA; note = MG178-7191 AttR
gttgatacaatcacgcggtggttgaatgccttgaaaaacaatccggatgaaaaggccgtaaagctgcttgtgaagcgaattgacgtttccggagataaaaagaacaacgtgttcaatatacaaagcacattgaacacgttgttggaaataatggttgcggagacaggatttgaacctgcgacctccgggttatgagcccgacgagctaccgaactgctccactccgcgatatgaacttgacccctcaaggctcatatactataacatatgagccttgggttgtcaagtgttattttagcgctcggaaacagaaga

SEQ ID NO: 7356 - DNA, 15 bp, synthetic construct
  source 1..15: mol_type = other DNA; note = MG178-7191 Core
atggttgcggagaca

SEQ ID NO: 7357 - DNA, 310 bp, synthetic construct
  source 1..310: mol_type = other DNA; note = MG178-7192 AttB
gttttacccgaatttttttgaaaaaaggtctttacaaactccccatgatatgctattatagtcaagcagtccaaaaacacatgggggcgtagctcacttgggagagcgcttgactggcagtcaagaggtagagagttcgatcctcttcgtctccaccaaaagagatccgcaggaacacagtttctgcggtctttttgtataatcgaccgactgtttttgttcccgttcctcatctacaaaggagacaccatgaaaaagaaactgaccgtaaaagagtacgtctatgttgccagcatgctgtttggcttgt

SEQ ID NO: 7358 - DNA, 310 bp, synthetic construct
  source 1..310: mol_type = other DNA; note = MG178-7192 AttL
gttttacccgaatttttttgaaaaaaggtctttacaaactccccatgatatgctattatagtcaagcagtccaaaaacacatgggggcgtagctcacttgggagagcgcttgactggcagtcaagaggtagagagttcgatcctcttcgtctccaccaaatagtgcaaatccgaactctgtgttcttcatcaaacacacctttggatttgtttacaagatagagaacgctgattgaatcggcgttctttttctttgccacgggacgagatgaagtagttaaagtagttgtttttcggtttttgcgtaaac

SEQ ID NO: 7359 - DNA, 310 bp, synthetic construct
  source 1..310: mol_type = other DNA; note = MG178-7192 AttP
atgaggattaccaacggcgcgtgattgatacattggtaaactctgtatatgtgtatgacgatgaagatggtgggaagcggattatgctaacattcaatctttcgggcaataataccgctactctcacgagttcggatattgggtgttatgctccaccaaatagtgcaaatccgaactctgtgttcttcatcaaacacacctttggatttgtttacaagatagagaacgctgattgaatcggcgttctttttctttgccacgggacgagatgaagtagttaaagtagttgtttttcggtttttgcgtaaac

SEQ ID NO: 7360 - DNA, 310 bp, synthetic construct
  source 1..310: mol_type = other DNA; note = MG178-7192 AttR
atgaggattaccaacggcgcgtgattgatacattggtaaactctgtatatgtgtatgacgatgaagatggtgggaagcggattatgctaacattcaatctttcgggcaataataccgctactctcacgagttcggatattgggtgttatgctccaccaaaagagatccgcaggaacacagtttctgcggtctttttgtataatcgaccgactgtttttgttcccgttcctcatctacaaaggagacaccatgaaaaagaaactgaccgtaaaagagtacgtctatgttgccagcatgctgtttggcttgt

SEQ ID NO: 7361 - DNA, 10 bp, synthetic construct
  source 1..10: mol_type = other DNA; note = MG178-7192 Core
ctccaccaaa

SEQ ID NO: 7362 - DNA, 312 bp, synthetic construct
  source 1..312: mol_type = other DNA; note = MG178-7194 AttB
cattcccatcaataccatcgtctccagcctggaaagcatatctgccgtactgttggcatggccggtactaagactgccatcgtgtccagtatttagggcctgcagcatatcgatcgcctccgctccccggacctcgcccacaataatccgatctgggcgcattctcagggccgacttgatcagatcgcggatcgtcacggcgcctgtcccctccacattgggattccttgcctcaaggctcaccaaattggggatttcctgcaattttaattctgcgttgtcttcaatggttataattctttcatcctttgg

SEQ ID NO: 7363 - DNA, 312 bp, synthetic construct
  source 1..312: mol_type = other DNA; note = MG178-7194 AttL
cattcccatcaataccatcgtctccagcctggaaagcatatctgccgtactgttggcatggccggtactaagactgccatcgtgtccagtatttagggcctgcagcatatcgatcgcctccgctccccggacctcgcccacaataatccgatctgggcgcatgataaaaataagagattcctcctccagtcgcttccatatattaccgtttgaaattatatatcactttgtatacaatatttatggaggaacaattacaatgaaccagtttgcaaaacgcttaaaatacttaagaatagaaagaaatcttac

SEQ ID NO: 7364 - DNA, 312 bp, synthetic construct
  source 1..312: mol_type = other DNA; note = MG178-7194 AttP
aacaaagaaaaattaccgactttattcgtaattttgaaaactttactcctgaagaaagaaacgccatagcccgtacatgtataaaagaatgcgtttgggatggtcatacgctttctgtcgtcctgtagttctctttattatcatgcgtctatctgggcgcatgataaaaataagagattcctcctccagtcgcttccatatattaccgtttgaaattatatatcactttgtatacaatatttatggaggaacaattacaatgaaccagtttgcaaaacgcttaaaatacttaagaatagaaagaaatcttac

SEQ ID NO: 7365 - DNA, 312 bp, synthetic construct
  source 1..312: mol_type = other DNA; note = MG178-7194 AttR
aacaaagaaaaattaccgactttattcgtaattttgaaaactttactcctgaagaaagaaacgccatagcccgtacatgtataaaagaatgcgtttgggatggtcatacgctttctgtcgtcctgtagttctctttattatcatgcgtctatctgggcgcattctcagggccgacttgatcagatcgcggatcgtcacggcgcctgtcccctccacattgggattccttgcctcaaggctcaccaaattggggatttcctgcaattttaattctgcgttgtcttcaatggttataattctttcatcctttgg

SEQ ID NO: 7366 - DNA, 12 bp, synthetic construct
  source 1..12: mol_type = other DNA; note = MG178-7194 Core
atctgggcgcat

SEQ ID NO: 7367 - DNA, 313 bp, synthetic construct
  source 1..313: mol_type = other DNA; note = MG178-7195 AttB
agccgatatctttttgctccgcctggagcacgaagcacctgtgtttttgcacaggtgcttttgtattttgggcctggtccttatatttatagtttaaaaccaaaatattaaaaccccataacttcgctggaagttatggggtttactcttcaatttggtggaactaactggactcgaaccagtgaccccctcgatgtcaacgaggtactctaaccaactgagctatagttccgcaacgatgttattttagcgtagaatcgtcattttgtcaaggacgttttactccctgaccgttactgcggtacctactttg

SEQ ID NO: 7368 - DNA, 313 bp, synthetic construct
  source 1..313: mol_type = other DNA; note = MG178-7195 AttL
agccgatatctttttgctccgcctggagcacgaagcacctgtgtttttgcacaggtgcttttgtattttgggcctggtccttatatttatagtttaaaaccaaaatattaaaaccccataacttcgctggaagttatggggtttactcttcaatttggtggaagaatttgtatcgtacccaaacaaatatttcactatatagaacggcattgataatacgcatcgatgccgcctaaaaactagccttataaagttttcttattaaacttcaagtcttctaatgtgccggtcttaaatttgcttttcttaaaac

SEQ ID NO: 7369 - DNA, 313 bp, synthetic construct
  source 1..313: mol_type = other DNA; note = MG178-7195 AttP
atgagatccggcaggaatttttaaatactttcgtatctaaagcgtatgtattttcagatcatctttttgtgatctatgatgccattaacggcatcaatactgaagttacacccgaaattttatcaaatccaaacgagttcggatacattccaatttggtggaagaatttgtatcgtacccaaacaaatatttcactatatagaacggcattgataatacgcatcgatgccgcctaaaaactagccttataaagttttcttattaaacttcaagtcttctaatgtgccggtcttaaatttgcttttcttaaaac

SEQ ID NO: 7370 - DNA, 313 bp, synthetic construct
  source 1..313: mol_type = other DNA; note = MG178-7195 AttR
atgagatccggcaggaatttttaaatactttcgtatctaaagcgtatgtattttcagatcatctttttgtgatctatgatgccattaacggcatcaatactgaagttacacccgaaattttatcaaatccaaacgagttcggatacattccaatttggtggaactaactggactcgaaccagtgaccccctcgatgtcaacgaggtactctaaccaactgagctatagttccgcaacgatgttattttagcgtagaatcgtcattttgtcaaggacgttttactccctgaccgttactgcggtacctactttg

SEQ ID NO: 7371 - DNA, 13 bp, synthetic construct
  source 1..13: mol_type = other DNA; note = MG178-7195 Core
caatttggtggaa

SEQ ID NO: 7372 - DNA, 312 bp, synthetic construct
  source 1..312: mol_type = other DNA; note = MG178-7196 AttB
cttcggcaggataaaaaaagagtccgaacgcgaattgcgtccagactcagccaaggagaaggaaagattcactgtacctgccgtcgcgagccgcttcagcaggataaaagaaaagagtccgaacgcgaattgcgtccagactcagtctggtggttgcgggagctggatttgaaccaacgaccttcgggttatgagcccgacgagctaccaaactgctccatcccgcgatattgaatttccagtgctctactataataccacatttcggagaaaaatgcaagtctttttttgatttttttcaaaagagtggga

SEQ ID NO: 7373 - DNA, 312 bp, synthetic construct
  source 1..312: mol_type = other DNA; note = MG178-7196 AttL
cttcggcaggataaaaaaagagtccgaacgcgaattgcgtccagactcagccaaggagaaggaaagattcactgtacctgccgtcgcgagccgcttcagcaggataaaagaaaagagtccgaacgcgaattgcgtccagactcagtctggtggttgcgggagttcgcaacatcttttaccaagaattttattgagatttatctaatataatatcatatattgattaatcaatgagattaacagtaaaaagtgaggaagcaagcttttaagctttatttcttatcattctggcgtgaatcgagataagattcc

SEQ ID NO: 7374 - DNA, 312 bp, synthetic construct
  source 1..312: mol_type = other DNA; note = MG178-7196 AttP
ctttacagtcgatcaaatccgtgcatggttggaagcactgaaagcaactcccgatgataaggcagtccgtttgcttatttctcgcattgacataaaacaaaagaccattattaacatggaaagcacgttaacaatggtcttaagtgaaattggttgcgggagttcgcaacatcttttaccaagaattttattgagatttatctaatataatatcatatattgattaatcaatgagattaacagtaaaaagtgaggaagcaagcttttaagctttatttcttatcattctggcgtgaatcgagataagattcc

SEQ ID NO: 7375 - DNA, 312 bp, synthetic construct
  source 1..312: mol_type = other DNA; note = MG178-7196 AttR
ctttacagtcgatcaaatccgtgcatggttggaagcactgaaagcaactcccgatgataaggcagtccgtttgcttatttctcgcattgacataaaacaaaagaccattattaacatggaaagcacgttaacaatggtcttaagtgaaattggttgcgggagctggatttgaaccaacgaccttcgggttatgagcccgacgagctaccaaactgctccatcccgcgatattgaatttccagtgctctactataataccacatttcggagaaaaatgcaagtctttttttgatttttttcaaaagagtggga

SEQ ID NO: 7376 - DNA, 12 bp, synthetic construct
  source 1..12: mol_type = other DNA; note = MG178-7196 Core
tggttgcgggag

SEQ ID NO: 7377 - DNA, 312 bp, synthetic construct; identical to SEQ ID NO: 7302
  source 1..312: mol_type = other DNA; note = MG178-7197 AttB

SEQ ID NO: 7378 - DNA, 312 bp, synthetic construct
  source 1..312: mol_type = other DNA; note = MG178-7197 AttL
ttaagaaagcttaagaggccagaagctccttacagttggacccatctgaaccgaattttgctaaaagcagacgaaaaaacgggaacgccgttcttttgctccctaaaagatcaagcctcctgtccatggacaggaggcttgcaagttatacagttggtgggctatctaacccttagtgcgaacctaaaagtacggatagggcgtggctggtttgccttatcctatccaatcccagtctagcgatattgtcaacttttatgaaaaataaatcaccccgtaaagccagttaatgcctgactctacggggattct

SEQ ID NO: 7379 - DNA, 312 bp, synthetic construct
  source 1..312: mol_type = other DNA; note = MG178-7197 AttP
caggaatacagaaccaagctgctagatatcttggtcagccgagttgttctctacccaaataaagcagaggttttttatcgctatcaaaaagaactcccttccctccctaatccagtgattatcagggaagaaaggggttcgaatggcaatcagttggtgggctatctaacccttagtgcgaacctaaaagtacggatagggcgtggctggtttgccttatcctatccaatcccagtctagcgatattgtcaacttttatgaaaaataaatcaccccgtaaagccagttaatgcctgactctacggggattct

SEQ ID NO: 7380 - DNA, 312 bp, synthetic construct
  source 1..312: mol_type = other DNA; note = MG178-7197 AttR
caggaatacagaaccaagctgctagatatcttggtcagccgagttgttctctacccaaataaagcagaggttttttatcgctatcaaaaagaactcccttccctccctaatccagtgattatcagggaagaaaggggttcgaatggcaatcagttggtgggcccactaggattcgaacctaggaccaaccggttatgagccgggggctctaccgctgagctataggcccaatgtaggaattataccccagaaaaagatgcgctgtcaacgtttcttactcgaggaattccttgaggggtttgctccgtttcg

SEQ ID NO: 7381 - DNA, 12 bp, synthetic construct
  source 1..12: mol_type = other DNA; note = MG178-7197 Core
cagttggtgggc

SEQ ID NO: 7382 - DNA, 315 bp, synthetic construct
  source 1..315: mol_type = other DNA; note = MG178-6304 AttB
gccatctggttcctcaacttctcgacgtggacgggccaccacggcatctacctggaggacctctacgtccgccccgaggcgcgcggcctcgggaccggccgggcgctcctcgctgccctggccaccgttgcccaccgctccgactacacccgtatcgactggtcggtgctcgattggaacgagcccgcgctgcgcttctaccggtcgctgggggccgagcccatggacgaatggaccggctaccggctctcgggcccggagctggccgccctggccggcggcgaacccgccacgtgaccggtcgggcccggccgg

SEQ ID NO: 7383 - DNA, 315 bp, synthetic construct
  source 1..315: mol_type = other DNA; note = MG178-6304 AttL
gccatctggttcctcaacttctcgacgtggacgggccaccacggcatctacctggaggacctctacgtccgccccgaggcgcgcggcctcgggaccggccgggcgctcctcgctgccctggccaccgttgcccaccgctccgactacacccgtatcgactggtcgactcttgcgtttggtaaccagagagagctaccctggtggcatgacccaacaactgcgagctgcgatttactgccggatctccaaggctaaggggaccaagaagactcagagcgtcgaagaccaggagcgagactgccgagacctctgcga

SEQ ID NO: 7384 - DNA, 315 bp, synthetic construct
  source 1..315: mol_type = other DNA; note = MG178-6304 AttP
tcagcggcttcgagttcttctacagctcactgtcgaacatcccctactatcggaggcacccatcggccagactcgctagaaccacgaaattcccctatgaatcgcggcagagcagcctgagctgggcaaatgctcgacttatcagatacacgtatcgactggtcgactcttgcgtttggtaaccagagagagctaccctggtggcatgacccaacaactgcgagctgcgatttactgccggatctccaaggctaaggggaccaagaagactcagagcgtcgaagaccaggagcgagactgccgagacctctgcga

SEQ ID NO: 7385 - DNA, 315 bp, synthetic construct
  source 1..315: mol_type = other DNA; note = MG178-6304 AttR
tcagcggcttcgagttcttctacagctcactgtcgaacatcccctactatcggaggcacccatcggccagactcgctagaaccacgaaattcccctatgaatcgcggcagagcagcctgagctgggcaaatgctcgacttatcagatacacgtatcgactggtcggtgctcgattggaacgagcccgcgctgcgcttctaccggtcgctgggggccgagcccatggacgaatggaccggctaccggctctcgggcccggagctggccgccctggccggcggcgaacccgccacgtgaccggtcgggcccggccgg

SEQ ID NO: 7386 - DNA, 15 bp, synthetic construct
  source 1..15: mol_type = other DNA; note = MG178-6304 Core
cgtatcgactggtcg

SEQ ID NO: 7387 - DNA, 314 bp, synthetic construct
  source 1..314: mol_type = other DNA; note = MG178-7199 AttB
cagcgagccgaccccgtacaggcttagagcgccgccggcatggaccgggctgaagccgagcttccgggtcaggtagagggtcaggaaaaagatgaccatcgagcccgaggaattgaccaggttgaccgtgaacaggatccaggccttgcgcggcaggccgctatacgcctggcggtaggtgtccctgatcttcccgagcatggccgttaaaagcgtattacaccaggacgggtgggaacgtcaaagaaaaaaccgggctaggatggggtcagacgttgaagcggatgctcaggatgtcgccgtccttgacgctg

SEQ ID NO: 7388 - DNA, 314 bp, synthetic construct
  source 1..314: mol_type = other DNA; note = MG178-7199 AttL
cagcgagccgaccccgtacaggcttagagcgccgccggcatggaccgggctgaagccgagcttccgggtcaggtagagggtcaggaaaaagatgaccatcgagcccgaggaattgaccaggttgaccgtgaacaggatccaggccttgcgcggcaggccgctattagggatttcttggccggcattattgccacacccgcccatttttacttggaccgactcaaaattgttttggaggaataaaatgaatgaatgtttcgaatgctggcaaaacgccaaagaggccggcgagatatctgaatcgcaacatcagc

SEQ ID NO: 7389 - DNA, 314 bp, synthetic construct
  source 1..314: mol_type = other DNA; note = MG178-7199 AttP
gtcgagaaagcctattctcaggcgatgcctgagcacagggccgaactactgcgcgtcctcttcgaggacatttccatcagcggcggaaaattcgtcttcaccccacaggccgtatttgccccgctctttgatttaaggcatggcaaaccacggcaggccgctattagggatttcttggccggcattattgccacacccgcccatttttacttggaccgactcaaaattgttttggaggaataaaatgaatgaatgtttcgaatgctggcaaaacgccaaagaggccggcgagatatctgaatcgcaacatcagc

SEQ ID NO: 7390 - DNA, 314 bp, synthetic construct
  source 1..314: mol_type = other DNA; note = MG178-7199 AttR
gtcgagaaagcctattctcaggcgatgcctgagcacagggccgaactactgcgcgtcctcttcgaggacatttccatcagcggcggaaaattcgtcttcaccccacaggccgtatttgccccgctctttgatttaaggcatggcaaaccacggcaggccgctatacgcctggcggtaggtgtccctgatcttcccgagcatggccgttaaaagcgtattacaccaggacgggtgggaacgtcaaagaaaaaaccgggctaggatggggtcagacgttgaagcggatgctcaggatgtcgccgtccttgacgctg

SEQ ID NO: 7391 - DNA, 14 bp, synthetic construct
  source 1..14: mol_type = other DNA; note = MG178-7199 Core
cggcaggccgctat

SEQ ID NO: 7392 - DNA, 306 bp, synthetic construct
  source 1..306: mol_type = other DNA; note = MG178-7200 AttB
ctcgtgggcggtcaacatccgcaagtacgtcgtgcgggcggaccacctcgaggacctcgtcgcgctcggctcgttgccgaccgatgccgcggccttcctctcggcggccgtgcgcgccgggttgaacgtgctcgtctccggcgcgacccaaggcgggcaagacgacgatgctcaacgcgctcgcgggcgccgtgcccgtgcgtgagcgggtcgtctcgtgcgaggaggtcttcgagctgcggctcgcggtccgggactgggtcgcgatgcagtgccgtcagcccaacctcgagggcacgggggaga

SEQ ID NO: 7393 - DNA, 306 bp, synthetic construct
  source 1..306: mol_type = other DNA; note = MG178-7200 AttL
ctcgtgggcggtcaacatccgcaagtacgtcgtgcgggcggaccacctcgaggacctcgtcgcgctcggctcgttgccgaccgatgccgcggccttcctctcggcggccgtgcgcgccgggttgaacgtgctcgtctccggcgcgacccaaggcggtagtctgcaagcgctttacacagtacgcttgagatctcatgaacatgagcgccgggccccgagccgtcatctacgtccgcatctccgttgcccaggaggcgtcggtctccatcgaacgccaggtcgaggcggcggaacagtacgccgctg

SEQ ID NO: 7394 - DNA, 306 bp, synthetic construct
  source 1..306: mol_type = other DNA; note = MG178-7200 AttP
gcgggctagctgatgaacaaggagactaacagcggaggtgaaagcttgtacagagattaagatctaaatcctgcaagcttcacccgttcgagtggtcgtcccgagtcgatgagaagtgagtaatacctggttcactaccggcctacacgcaggcggtagtctgcaagcgctttacacagtacgcttgagatctcatgaacatgagcgccgggccccgagccgtcatctacgtccgcatctccgttgcccaggaggcgtcggtctccatcgaacgccaggtcgaggcggcggaacagtacgccgctg

SEQ ID NO: 7395 - DNA, 306 bp, synthetic construct
  source 1..306: mol_type = other DNA; note = MG178-7200 AttR
gcgggctagctgatgaacaaggagactaacagcggaggtgaaagcttgtacagagattaagatctaaatcctgcaagcttcacccgttcgagtggtcgtcccgagtcgatgagaagtgagtaatacctggttcactaccggcctacacgcaggcgggcaagacgacgatgctcaacgcgctcgcgggcgccgtgcccgtgcgtgagcgggtcgtctcgtgcgaggaggtcttcgagctgcggctcgcggtccgggactgggtcgcgatgcagtgccgtcagcccaacctcgagggcacgggggaga

SEQ ID NO: 7396 - skipped

SEQ ID NO: 7397 - DNA, 313 bp, synthetic construct
  source 1..313: mol_type = other DNA; note = MG178-7203 AttB
gcttcaatagccttaaagtcatacttgctattatgctccataaacgtcctccttctgaattattattgcctataaatagcaaaaactctcatcctgctcagggacgagagtatattcccgcggtaccacccttattgacaaatataataatggtggagctagagggattcgaaccctcgacctcttgaatgccattcaagcgcgctcccaactgcgccatagccccacatttgtccactctattgatgataacggtatctccgttacaggcttatcacctgtaaagcttcccggcgagttcgacatctgctgc

SEQ ID NO: 7398 - DNA, 313 bp, synthetic construct
  source 1..313: mol_type = other DNA; note = MG178-7203 AttL
gcttcaatagccttaaagtcatacttgctattatgctccataaacgtcctccttctgaattattattgcctataaatagcaaaaactctcatcctgctcagggacgagagtatattcccgcggtaccacccttattgacaaatataataatggtggagctagaccgtcccaggaagtatccgcacagttaccattcgcaggcgcagagcaattgatggtggcactcacctttggccgcctccaagaggccaaggcgttcgatatgcgttaaaccctccgtccatgccacgccgaacgtgccgtccctgtactt

SEQ ID NO: 7399 - DNA, 313 bp, synthetic construct
  source 1..313: mol_type = other DNA; note = MG178-7203 AttP
tgaaccatgttagcgaggcgcttaaagaagccaaaagcccggctgagtaccgggccgcgatccaccgcttcatcgaccggatagtggtcggcgaaaaaatgatccaaatccacttcctggccgacttcggcggcggtgtgtggataaagttggtggagctagaccgtcccaggaagtatccgcacagttaccattcgcaggcgcagagcaattgatggtggcactcacctttggccgcctccaagaggccaaggcgttcgatatgcgttaaaccctccgtccatgccacgccgaacgtgccgtccctgtactt

SEQ ID NO: 7400 - DNA, 313 bp, synthetic construct
  source 1..313: mol_type = other DNA; note = MG178-7203 AttR
tgaaccatgttagcgaggcgcttaaagaagccaaaagcccggctgagtaccgggccgcgatccaccgcttcatcgaccggatagtggtcggcgaaaaaatgatccaaatccacttcctggccgacttcggcggcggtgtgtggataaagttggtggagctagagggattcgaaccctcgacctcttgaatgccattcaagcgcgctcccaactgcgccatagccccacatttgtccactctattgatgataacggtatctccgttacaggcttatcacctgtaaagcttcccggcgagttcgacatctgctgc

SEQ ID NO: 7401 - DNA, 13 bp, synthetic construct
  source 1..13: mol_type = other DNA; note = MG178-7203 Core
tggtggagctaga

SEQ ID NO: 7402 - DNA, 306 bp, synthetic construct
  source 1..306: mol_type = other DNA; note = MG178-7204 AttB
gctggccaaacgcctgcccaccatattaccaccacttactttgcatgaagcgcttgaaaccacaaagattcacagtgtagcaggaaaactacccgaaaatgccacattgatttcaaaaagaccttttcgcagcccgcaccataccgtttcggatgcggctttggttggtggcggcagcaccccgcaaccgggggaaatttcactggcacataatggcgtattatttttagacgaattgcctgaattcaaaagaaccgcgctggaagtgatgcgccagcccatggaagagagaaaagtaactatcag

SEQ ID NO: 7403 - DNA, 306 bp, synthetic construct
  source 1..306: mol_type = other DNA; note = MG178-7204 AttL
gctggccaaacgcctgcccaccatattaccaccacttactttgcatgaagcgcttgaaaccacaaagattcacagtgtagcaggaaaactacccgaaaatgccacattgatttcaaaaagaccttttcgcagcccgcaccataccgtttcggatgctatgatattacagtaggcggtcgtatattgtgaaaaataagactatttttcaatgaaacgtatagccatctacagccgcgtatcaacagcagataaacaggattacacaaggcaggttaacgaacttaagaagattggttacgataacgg

SEQ ID NO: 7404 - DNA, 306 bp, synthetic construct
  source 1..306: mol_type = other DNA; note = MG178-7204 AttP
caggcgtaagagattttaccatatttcaaggattttaggtttatgaacacctaaatttaagaaaaacagccaaaatattttattagctaaacccttatctgtagcgggtttcaacgccagtttcaccaccccccactaaaatgccgctggggatgctatgatattacagtaggcggtcgtatattgtgaaaaataagactatttttcaatgaaacgtatagccatctacagccgcgtatcaacagcagataaacaggattacacaaggcaggttaacgaacttaagaagattggttacgataacgg

SEQ ID NO: 7405 - DNA, 306 bp, synthetic construct
  source 1..306: mol_type = other DNA; note = MG178-7204 AttR
caggcgtaagagattttaccatatttcaaggattttaggtttatgaacacctaaatttaagaaaaacagccaaaatattttattagctaaacccttatctgtagcgggtttcaacgccagtttcaccaccccccactaaaatgccgctggggatgcggctttggttggtggcggcagcaccccgcaaccgggggaaatttcactggcacataatggcgtattatttttagacgaattgcctgaattcaaaagaaccgcgctggaagtgatgcgccagcccatggaagagagaaaagtaactatcag

SEQ ID NO: 7406 - skipped

SEQ ID NO: 7407 - DNA, 22 bp, synthetic construct
  source 1..22: mol_type = other DNA; note = IVT Junction rev
cccttcaccttctatctcgaac

SEQ ID NO: 7408 - DNA, 16 bp, synthetic construct
  source 1..16: mol_type = other DNA; note = IVT 47 junction fwd
actcggccttggcact

SEQ ID NO: 7409 - DNA, 19 bp, synthetic construct
  source 1..19: mol_type = other DNA; note = IVT 37 junction fwd
gccgagaaccttgtcttcc

SEQ ID NO: 7410 - DNA, 18 bp, synthetic construct
  source 1..18: mol_type = other DNA; note = IVT 36 junction fwd
acagccgttttgactgga

SEQ ID NO: 7411 - DNA, 18 bp, synthetic construct
  source 1..18: mol_type = other DNA; note = IVT 20 junction fwd
aggtacacctcctgcagc

SEQ ID NO: 7412 - protein, 97 aa, synthetic construct
  source 1..97: note = Sumo Tag
SDSEVNQEAKPEVKPEVKPETHINLKVSDGSSEIFFKIKKTTPLRRLMEAFAKRQGKEMDSLRFLYDGIRIQADQTPEDLDMEDNDIIEAHREQIGG

SEQ ID NO: 7413 - protein, 6 aa, synthetic construct
  source 1..6: note = Hexahistadine Tag
HHHHHH

SEQ ID NO: 7414 - protein, 6 aa, synthetic construct
  source 1..6: note = SV40 NLS
KKKRKV

SEQ ID NO: 7415 - protein, 9 aa, synthetic construct
  source 1..9: note = HA
YPYDVPDYA

SEQ ID NO: 7416 - DNA, 18 bp, synthetic construct
  source 1..18: mol_type = other DNA; note = mcherry rev
aactccttgatgatggcc

SEQ ID NO: 7417 - DNA, 23 bp, synthetic construct
  source 1..23: mol_type = other DNA; note = pCMV mNeon fwd
cgatggatagcgattttattatc

SEQ ID NO: 7418 - protein, 8 aa, synthetic construct
  source 1..8: note = PS protease cleavage site
LEVLFQGP

SEQ ID NO: 7419 - protein, 7 aa, synthetic construct
PKKKRKV

SEQ ID NO: 7420 - protein, 16 aa, synthetic construct
KRPAATKKAGQAKKKK

SEQ ID NO: 7421 - protein, 9 aa, synthetic construct
PAAKRVKLD

SEQ ID NO: 7422 - protein, 11 aa, synthetic construct
RQRRNELKRSP

SEQ ID NO: 7423 - protein, 38 aa, synthetic construct
NQSSNFGPMKGGNFGGRSSGPYGGGGQYFAKPRNQGGY

SEQ ID NO: 7424 - protein, 42 aa, synthetic construct
RMRIZFKNKGKDTAELRRRRVEVSVELRKAKKDEQILKRRNV

SEQ ID NO: 7425 - protein, 8 aa, synthetic construct
VSRKRPRP

SEQ ID NO: 7426 - protein, 8 aa, synthetic construct
PPKKARED

SEQ ID NO: 7427 - protein, 8 aa, synthetic construct
PQPKKKPL

SEQ ID NO: 7428 - protein, 12 aa, synthetic construct
SALIKKKKKMAP

SEQ ID NO: 7429 - protein, 5 aa, synthetic construct
DRLRR

SEQ ID NO: 7430 - protein, 7 aa, synthetic construct
PKQKKRK

SEQ ID NO: 7431 - protein, 10 aa, synthetic construct
RKLKKKIKKL

SEQ ID NO: 7432 - protein, 10 aa, synthetic construct
REKKKFLKRR

SEQ ID NO: 7433 - protein, 20 aa, synthetic construct
KRKGDEVDGVDEVAKKKSKK

SEQ ID NO: 7434 - protein, 17 aa, synthetic construct
RKCLQAGMNLEARKTKK

SEQ ID NO: 7435 - DNA, 59 bp, synthetic construct
  source 1..59: mol_type = other DNA
gttacatcattttataaacattgcatcccctatgatgcgatttcgacacaaaatcttat

SEQ ID NO: 7436 - DNA, 59 bp, synthetic construct
  source 1..59: mol_type = other DNA
attgtgtcaaagtatcaacatagcatcccctatgatgcgatttcgacacaaaatcttat

SEQ ID NO: 7437 - DNA, 59 bp, synthetic construct
  source 1..59: mol_type = other DNA
gttacatcattttataaacattgcatccccaaaggaaaagaaccggtatttctcctgca

SEQ ID NO: 7438 - DNA, 73 bp, synthetic construct
  source 1..73: mol_type = other DNA
aaatgtaagaaattgtgtcaaagtatcaacatagcatccccaaaggaaaagaaccggtatttctcctgcaccg

SEQ ID NO: 7439 - DNA, 73 bp, synthetic construct
  source 1..73: mol_type = other DNA
aaatgtaagaaattgtgtcaaagtatcaacatagcatcccctatgatgcgatttcgacacaaaatcttatatt

SEQ ID NO: 7440 - DNA, 73 bp, synthetic construct
  source 1..73: mol_type = other DNA
tacaagaaatagttacatcattttataaacattgcatccccaaaggaaaagaaccggtatttctcctgcaccg

SEQ ID NO: 7441 - DNA, 84 bp, synthetic construct
  source 1..84: mol_type = other DNA
  misc_difference 11: note = nucleotide may be deleted
  misc_difference 12: note = nucleotide may be deleted
  misc_difference 13: note = nucleotide may be deleted
  misc_difference 14: note = nucleotide may be deleted
  misc_difference 32: note = nucleotide may be deleted
  misc_difference 33: note = nucleotide may be deleted
  misc_difference 34: note = nucleotide may be deleted
  misc_difference 35: note = nucleotide may be deleted
ywkytgkkycaggatgcgwtykkagtykasaaaatgtwgcctwygggcamccmargswrayraaycckacwytyggrgykkysk

SEQ ID NO: 7442 - DNA, 80 bp, synthetic construct
  source 1..80: mol_type = other DNA
cagctgggtcaggatgcgttcggagtcgacagttgccttcgggcaccccaaggaaataaaccctacacttggagctttct

SEQ ID NO: 7443 - DNA, 80 bp, synthetic construct
  source 1..80: mol_type = other DNA
tttttgttcctgcgattttagtttagaaaatgtagcctatgggcaaccaaggctgacgaatccgactttcggggtggcgg

SEQ ID NO: 7444 - DNA, 81 bp, synthetic construct
  source 1..81: mol_type = other DNA
  misc_difference 9: note = nucleotide may be deleted
  misc_difference 28: note = nucleotide may be deleted
rkmtwtgcatramcarwaawymgyattgtmtmattacatayggatgtcaaatgaaywmktmmrwywsrkrrmrwkawssss

SEQ ID NO: 7445 - DNA, 80 bp, synthetic construct
  source 1..80: mol_type = other DNA
atctatgcataaacagaaattcgcatttataattacatatggatgtcaaatgaattcgtccgattcggagcgttatgccg

SEQ ID NO: 7446 - DNA, 80 bp, synthetic construct
  source 1..80: mol_type = other DNA
ggatttgctgaccaataaacagtattgtctcattacatacggatgtcaaatgaacaattaaatcagatgaaaagaacggc

SEQ ID NO: 7447 - DNA, 88 bp, synthetic construct
  source 1..88: mol_type = other DNA
  misc_difference 41: note = nucleotide may be deleted
  misc_difference 42: note = nucleotide may be deleted
  misc_difference 43: note = nucleotide may be deleted
  misc_difference 44: note = nucleotide may be deleted
  misc_difference 45: note = nucleotide may be deleted
  misc_difference 46: note = nucleotide may be deleted
  misc_difference 47: note = nucleotide may be deleted
  misc_difference 48: note = nucleotide may be deleted
tgtgagagrtaamgsmtkykkgmwsmyattwyaccktmcggaagaatagtccaccatactksckkawgrtwwwmtkwksmkmmkkcsk

SEQ ID NO: 7448 - DNA, 80 bp, synthetic construct
  source 1..80: mol_type = other DNA
tgtgagaggtaacgcatgctggcacccatttcaccgtccggtccaccatacttccgtaaggtataattatgataaggcct

SEQ ID NO: 7449 - DNA, 80 bp, synthetic construct
  source 1..80: mol_type = other DNA
ataaaggctttgtgatgatattataccttacggaagaatagtccaccatactggctgatgattatctgtgccgccttcgg
